United States Patent Application Publication US 2007/0277269 A1 - sequence listing, part 4

SEQ ID NO: 9115 - DNA, 1504 bp, Zea mays
  misc_feature: Ceres CLONE ID no. 1487113
  misc_feature: Ceres CDNA ID no. 40041437
  CDS (246)..(1181): REFERENCED BY SEQ ID NO: 9116
aaaaaaaacaaaaaaccccacgcctttcctcgccggcgaaggagaagccgcagcgctgctcccacgcccctaggagcgcgtgcctccattccatgtgcgcccgcccaccggaggataacctttgatcatttcgtttgctggacattggaccaactggtgctgttatacatagaaaggatttcattttaaattctcatctatatttggtggtgccataatcatttttccactggcgtttggcaataatgtcggagagcgagttagcagtaataaaaccagaggtgttgaagacatatatctggcttcagtgctttgatggttccatacagcaagtggaggaggaggttgcaatgttctgccccatgatatgtcaggaaattgtgaaaaatggcacagggtcatcaaaaaatcatgctattgctctcccggaaagagttaatccagccaatttgagtttgattcttgactactgtcgatttcatcagatcactgggcgttcaaacatggagcggaagtcctttgatgaaaagtttgttaggatagaaacagaaagactctgcgaattgacttctgcagccgacagtctacagttaaagccacttgttgatcttactggccgagcgcttgctcgaatcattgaaggaaagacacctgaggaaattcgtgacattttccatttaccagatgatttaacagaggaagagaaattggagcccctaaaaaatataaatgatggtcctgctaggattcgcctactgaaccggttgtatgccaagaagcggaaagagctccaggagcgccataagctgaaggatgttcaagtacagaaagagcaaaaagatgagagatctttggatgagttacttagttttattaatggggatggaggttcaggaggcaggaaagctaccaagagtaagaaaaagaataaaaggaaggatcgtgttgagaaccccccaaaagctgactctgagcctgtaaatgcgaatccagatatgcaagatgatgccgagtacccttttgaagatgctgacctcgatgatggacttgatcctgcaatgaaagaagagcttgatagagaagttgaggcctttgcgaagaggttggattcagtttggaaggagtcacatattggtggtaatggttctgcacggagatttcctgggtttaatcacatgtgagtgttaagctggtaggatcagaaggcagaagcagaggagatttgtggacatacagcctggaagagagtaaaaataccaaacagtcgacttgctcctgtgtgtttgataagggcatgtacaaccctgaaatcatggatcggttttgcgaagtacaaaagacatgttaagagactataccctgagcctttggatcataaatgtaagtaagaggcaatgtgtgtagagaattgtgtagagacagtctcttcgcgaaaagagagcctgtctattgtattttttcaattaaccctcaagagacttcatattgaaaaaaaaaaaaaaaa

SEQ ID NO: 9116 - protein, 311 aa, Zea mays
  misc_feature: Ceres CLONE ID no. 1487113
  misc_feature: Ceres CDNA ID no. 40041437
  misc_feature (90)..(167): Pfam Name: Skp1 PFAM Desc: Skp1 family
  misc_feature: Homolog of GI Number: 34902374 NR Desc: Putative SKP1
  misc_feature: Homolog of GI Number: 42569956 NR Desc: SKP1 family protein
  misc_feature: Homolog of GI Number: 21537190 NR Desc: putative SKP1
  misc_feature: Homolog of GI Number: 20197211 NR Desc: E3 ubiquitin ligase SCF complex subunit SKP1/ASK1
  misc_feature: Homolog of GI Number: 62467589 NR Desc: Skp1
  misc_feature: Homolog of GI Number: 2673868 NR Desc: fimbriata
  misc_feature: Homolog of GI Number: 55628664 NR Desc:  similar to S
  misc_feature: Homolog of GI Number: 60474028 NR Desc: cytosolic glycoprotein FP21
  misc_feature: Homolog of GI Number: 55624768 NR Desc:  similar to S
  misc_feature: Homolog of GI Number: 73948993 NR Desc:  similar to S
MSESELAVIKPEVLKTYIWLQCFDGSIQQVEEEVAMFCPMICQEIVKNGTGSSKNHAIALPERVNPANLSLILDYCRFHQITGRSNMERKSFDEKFVRIETERLCELTSAADSLQLKPLVDLTGRALARIIEGKTPEEIRDIFHLPDDLTEEEKLEPLKNINDGPARIRLLNRLYAKKRKELQERHKLKDVQVQKEQKDERSLDELLSFINGDGGSGGRKATKSKKKNKRKDRVENPPKADSEPVNANPDMQDDAEYPFEDADLDDGLDPAMKEELDREVEAFAKRLDSVWKESHIGGNGSARRFPGFNHM

SEQ ID NO: 9117 - DNA, 697 bp, Zea mays
  misc_feature: Ceres CLONE ID no. 1487141
  misc_feature: Ceres CDNA ID no. 25446146
  CDS (112)..(492): REFERENCED BY SEQ ID NO: 9118
gagatctatccccgtttccaacctcacacccccccttccattggagctccttcgtctgagttaaacctaaaccctaatcgcgacctgcgttcgtcaaaaccctacctggccatggacggcggaggaggaggcggtggaggaggaggtggagttggggcaggtgtcatggtgggtggcggagtcgtgccgggcggcgggggcggcgacgtggaactcgtcagcaagacgctgcagttcgagcacaagctgttctactttgatctgaaggagaacccgcgggggaggtacctcaagatctccgagaagacatcggccacgcgctccaccatcatcgtccccatcgacggcgtcgcctggttcctcgacctcttcgactactacatccgcaccgacgagcgcgacgtcttcagcaaggagctgcgactccagaccaaggtgttctatttcgatatcggggagaacaagaggggccgattcctcaaggtgacgtaacgttctctgtatgacctagcgcatcttcaaattttctcatctttttatgtgctggtatgagaaaattgcctaattggggaacttcattatttggaagccaaactgtttagctagaacaaggggtaatttgtcgcactagaacagtgtttgcttgtgtgaatttaggaagtgaaaaatgtcctattgttcaaaaaaaaaaaaaaaa

SEQ ID NO: 9118 - protein, 126 aa, Zea mays
  misc_feature: Ceres CLONE ID no. 1487141
  misc_feature: Ceres CDNA ID no. 25446146
  misc_feature (32)..(126): Pfam Name: PurA PFAM Desc: PurA ssDNA and RNA
  misc_feature: Homolog of GI Number: 56783985 NR Desc: purine rich element binding protein B
  misc_feature: Homolog of GI Number: 16930405 NR Desc: At2g32080/F22D22.17
  misc_feature: Homolog of GI Number: 20197621 NR Desc: putative purine
  misc_feature: Homolog of GI Number: 75755796 NR Desc: TO4
  misc_feature: Homolog of GI Number: 50795434 NR Desc:  similar to purine rich element binding protein B
  misc_feature: Homolog of GI Number: 34878862 NR Desc: similar to TRANSCRIPTIONAL ACTIVATOR PROTEIN PUR
  misc_feature: Homolog of GI Number: 9652255 NR Desc: DNA binding protein pur
  misc_feature: Homolog of GI Number: 58386175 NR Desc: ENSANGP00000016990
  misc_feature: Homolog of GI Number: 55624954 NR Desc:  similar to Transcriptional activator protein PUR
  misc_feature: Homolog of GI Number: 346338 NR Desc: single
MDGGGGGGGGGGGVGAGVMVGGGVVPGGGGGDVELVSKTLQFEHKLFYFDLKENPRGRYLKISEKTSATRSTIIVPIDGVAWFLDLFDYYIRTDERDVFSKELRLQTKVFYFDIGENKRGRFLKVT

SEQ ID NO: 9119 - DNA, 848 bp, Zea mays
  misc_feature: Ceres CLONE ID no. 1487143
  misc_feature: Ceres CDNA ID no. 25445668
  CDS (67)..(588): REFERENCED BY SEQ ID NO: 9120
cccaacttaacgccgatcggaggccggagagaccggctcagcctcgctccgccgccgccggcgaccatgtccctggcggctatcttcgtcttcctcatcgtgtccgcgctgcagctgctctaccgctacctcgacctcgccagaaagagcggaggacttagtgatgagcagatcaaagtgcggcttgaaatcaagcaacttctcaaggaggctgatcagttgtcaacgccgtccacatttgcacaagctgctaaactcaagcgcctggctgctgccaaggagaaggaactggcaaaaatgcaggaacatgaccttaaagggaagcaatccttatacgacaaatacacaaaatttttgttggttactaaggtcataatttatgctgtgctcgttctgtgcttttggagtactcctgtaactgcagttccacaacatcttctacagcccttcggaaaaatgttttcctggagaggtgttgatactgccaccggcaatgttgtggttggaatactcccgtggctgtttttgacctctcgggtcagcaagatgctgtgccagaaactgggcttcgtgcttgtgcgtccgtagcgcctttccatgagaaagtcagcaagttgctgcacctaaacaagactgctaactttgttcttcttctatatctttttataatcaactgtttcacttattgtccactatatactctgtccgttcttttttaattgtcgtgttttagtttaaaaattagcgggcgataaatattcgagaacggacttgtagtcatataaatttgctgtgctatgtgctcaagcggatacgtgtataagttactagtaaaaaaaaaaaaaaaa

SEQ ID NO: 9120 - protein, 173 aa, Zea mays
  misc_feature: Ceres CLONE ID no. 1487143
  misc_feature: Ceres CDNA ID no. 25445668
MSLAAIFVFLIVSALQLLYRYLDLARKSGGLSDEQIKVRLEIKQLLKEADQLSTPSTFAQAAKLKRLAAAKEKELAKMQEHDLKGKQSLYDKYTKFLLVTKVIIYAVLVLCFWSTPVTAVPQHLLQPFGKMFSWRGVDTATGNVVVGILPWLFLTSRVSKMLCQKLGFVLVRP

SEQ ID NO: 9121 - DNA, 653 bp, Zea mays
  misc_feature: Ceres CLONE ID no. 1487152
  misc_feature: Ceres CDNA ID no. 29191587
  CDS (85)..(453): REFERENCED BY SEQ ID NO: 9122
ctcgttcaccccctccctctcgatctcctcccacctcacctcctcctcgcctcttgccgacgtttcgtcaaggttccggcggcgatggcggcgaggctcgcgcagctgcggaccaaggcggcgcaggcggcggaattcgcctcgaagcacggcggcgcctactacaaggaggcgatggagaagaacaagcagtacgtcgtgcagcctccctccgtggagaagtgccaggagctctccaagcagctcttctacacgcgcctcgcgagtctaccaggccgctatgaagcattgtggaaggaggttgacggtgtcaagcagctttggaagaacaggaaggagctcaaggtggaggaccttggaattgcaacactgtttggggttgagctttatgcatggttctgcgtaggcgagattgcaggcagaggattcaccttaaccggctataaggtctgaattagatgtcgaggcgcgccttataatatactcttagctgatgcttgtcgaaattacctgtcttggttcacaattttgtttctgaaaagtttccagtgctgaatgccagcaagacgagcacacaattgcaacagtgcctcaataatttgctcgctcaattgcccattatttttttgtggtctgtaaaaaaaaaaaaaaaa

SEQ ID NO: 9122 - protein, 122 aa, Zea mays
  misc_feature: Ceres CLONE ID no. 1487152
  misc_feature: Ceres CDNA ID no. 29191587
  misc_feature (8)..(122): Pfam Name: ATP PFAM Desc: Mitochondrial ATP synthase g subunit
  misc_feature: Homolog of GI Number: 50901924 NR Desc: P0025A05.24
  misc_feature: Homolog of GI Number: 21553484 NR Desc: copia
MAARLAQLRTKAAQAAEFASKHGGAYYKEAMEKNKQYVVQPPSVEKCQELSKQLFYTRLASLPGRYEALWKEVDGVKQLWKNRKELKVEDLGIATLFGVELYAWFCVGEIAGRGFTLTGYKV

SEQ ID NO: 9123 - DNA, 659 bp, Zea mays
  misc_feature: Ceres CLONE ID no. 1487163
  misc_feature: Ceres CDNA ID no. 36707268
  CDS (68)..(316): REFERENCED BY SEQ ID NO: 9124
actgcgactgtgagcttcgttcgttcagttcatccgtgttcttgtttgcgaggtcgagagagagaggatgtcgtgctgcggaggcaactgtgggtgcggctccggctgcaagtgcggcaacggctgcggagggtgcagcaagatgtacccggacatggctgagcaggtgaccaccaccacccaggctctcatcatgggtgtcgcaccatccaaggggcacgccgagggcgggttcgaggcggccgccggagctgagaacggcgggtgcaagtgcggcggcaactgccagtgcgacccctgcaactgcggcaagtgagctaggtgctccaccctgcaggccggccggaggaagctagctaattattataagctaaataaagtatagcggcgtcgctgtgtgtgtttcgagtcagtcagtcagttagttgcgtgccatggctggcatgctctgagtctgagatgatgatgatgcctgatggcggcgtcgtgtcctgtagtcctcccctgccccctcgggcgcttctggcggcgagcagtgtgttgtgttgtgttgtgtgggtgcagcacggtagcaggctagccatgtgccctgctgtgttgtgtcaccatccatctataataatcttatatctataccccaccttttgtgtaaaaaaaaa

SEQ ID NO: 9124 - protein, 82 aa, Zea mays; identical to SEQ ID NO: 906
  misc_feature: Ceres CLONE ID no. 1487163
  misc_feature: Ceres CDNA ID no. 36707268
  misc_feature (1)..(80): Pfam Name: Metallothio_2 PFAM Desc: Metallothionein
  misc_feature: Homolog of GI Number: 55416162 NR Desc: metallothionein
  misc_feature: Homolog of GI Number: 46358913 NR Desc: metallothionein
  misc_feature: Homolog of GI Number: 34895842 NR Desc: putative metallothionein
  misc_feature: Homolog of GI Number: 13491970 NR Desc: metallothionein
  misc_feature: Homolog of GI Number: 15825501 NR Desc: type 2 metallothionein
  misc_feature: Homolog of GI Number: 3901014 NR Desc: metallothionein
  misc_feature: Homolog of GI Number: 32400768 NR Desc: metallothionein
  misc_feature: Homolog of GI Number: 46850185 NR Desc: metallothionein 2a
  misc_feature: Homolog of GI Number: 23954357 NR Desc: metallothioneine type2
  misc_feature: Homolog of GI Number: 169713 NR Desc: metallothionein

SEQ ID NO: 9125 - DNA, 658 bp, Zea mays
  misc_feature: Ceres CLONE ID no. 1487179
  misc_feature: Ceres CDNA ID no. 25446147
  CDS (70)..(246): REFERENCED BY SEQ ID NO: 9126
atttttgtttggtgagccacgctcccatccggatccgcgggggaggacggcgatttcgtccccagcctcatgaggtcgggaaggggttcccgcacccacatttgtgaacctcgccggcgcccatcccctgccttcacgaacccgccgccgcccgtcccctactcttcctcgtgcacccaccgtcgctcgtcccctcgtcttccttgcgcactcgccgtcgcctcctcctcaccctcacgcacttgaggccagctgcagaacgaggtcggacggcggagacgaggtcgaggtctacgacctcctcaacttgcgcaagactgccgagactgcagggacaagctctttgctgcctcgtcagctgctagctgacttctcgtgatacacaagggtttttcatcaacaagtggtcgccagaagaactgaaacatcaagatggcgtttgcttttaggtcatgccattcaggagatgatgctaagctaaataatcacatctatgtgtacactgagactgttttattatgagactatgttttattatgatgcactgagactatgtttgtgtacactgagactgttttattatgatgcactgagactgttttattaagcagtgtggagttctcggctgctgttctcatttttaaaaaaaaaaaaaaaa

SEQ ID NO: 9126 - protein, 58 aa, Zea mays
  misc_feature: Ceres CLONE ID no. 1487179
  misc_feature: Ceres CDNA ID no. 25446147
MRSGRGSRTHICEPRRRPSPAFTNPPPPVPYSSSCTHRRSSPRLPCALAVASSSPSRT

SEQ ID NO: 9127 - DNA, 812 bp, Zea mays
  misc_feature: Ceres CLONE ID no. 1487849
  misc_feature: Ceres CDNA ID no. 25446628
  CDS (2)..(397): REFERENCED BY SEQ ID NO: 9128
aataggagtcggagccgccgcccgtcctccatcctcctgcacggcaggggcagccacacttgttggttcctctccctctaccctctcccgtgtggcggcgggggatatcatctatgatggggtggctgcggctccactccctcttctcccctctccggaggatgtgggtgagggcgcattccgagcgccggaaccggagggggatgcgcatcctgtacaaggacgtgcagtcctgccaggacgaggacgtgcgcgtgctctggtccatcctcatcgactcccaccgccaccaccaccaccacccggccgtcctcgacctcgagctctgaagaagaatctcatcagcgcgatggcgtgcacgtacgtacgtatttatgcacgtgggatcgatatgtgatcaagagagcacagcactggccttccattattccttcagaaaaagaaaatggactcagaggttgaagaaggagaagagagactgggaggtgtttaattctatgcttctgtgtgctgctgttttccttttcttttcctttcttttttttgcacctttgttctgggcttgaaaaaacgagtgtgaggttgagctctctgtacatagacacacacggacatttgctcaagtgccttaccttcaattctaccgtactgtacacttgtgttctttgtgtatttgcatcgcgtgtatctcggatgcatggaagcctggttgttaggctagtgtatctgcccctgccttttttttgttgttgttaaaaaaaaaaaaaaaaaaaaaaaaaaaaaaaaaaaaaaaaaaaaaaaaaaaaaaaaaa

SEQ ID NO: 9128 - protein, 71 aa, Zea mays
  misc_feature: Ceres CLONE ID no. 1487849
  misc_feature: Ceres CDNA ID no. 25446628
MMGWLRLHSLFSPLRRMWVRAHSERRNRRGMRILYKDVQSCQDEDVRVLWSILIDSHRHHHHHPAVLDLEL

SEQ ID NO: 9129 - DNA, 645 bp, Zea mays
  misc_feature: Ceres CLONE ID no. 1487878
  misc_feature: Ceres CDNA ID no. 25445756
  CDS (1)..(198): REFERENCED BY SEQ ID NO: 9130
aacactcctgccgttcgcgtcgtctccgcccgcaccatcctcgacaaatcttccatgcacattggtcgcacccacaccgccaagtgcctcgtcggatacaacaccggcaccgtcctcatcacacccgcaacaattaggcaaatttgtcatagatacactcacggtgtgctggtgtgtatgtgtggaggaagagcctgacggaggctgagggagaggaatcagtagagcaaatcagcaagatgagacagatgtgtagctgctggtatttctccactatcgcgacctcactgctcaagcatggcctatatagagtgacgagaacaccatggaacggagttgtgctgttgtggtgcggagtaggagcgtctaagcgaggagagaatcacaggttaacaggtccacttcaaagcctggccatcatcaatagtcgaacgggtgtaaatggatgacgaagccgaagagcaatgatatgaagctttggtggatgatgatgaagctgaagacacttctatgaaaaaactctagagaaattcttcaattacccttgtaaaaaatattgtaatttaagaatcagatactactttgtaaatttgtgcataccttgtaatatatttttaccttttcgaccaaaaaaaaaaaaaaaaa

SEQ ID NO: 9130 - protein, 69 aa, Zea mays
  misc_feature: Ceres CLONE ID no. 1487878
  misc_feature: Ceres CDNA ID no. 25445756
MRQMCSCWYFSTIATSLLKHGLYRVTRTPWNGVVLLWCGVGASKRGENHRLTGPLQSLAIINSRTGVNG

SEQ ID NO: 9131 - DNA, 772 bp, Zea mays
  misc_feature: Ceres CLONE ID no. 1488142
  misc_feature: Ceres CDNA ID no. 25447072
  CDS (169)..(516): REFERENCED BY SEQ ID NO: 9132
aaagccagacagaagacaacccgtcagcccctctcgtttttcatccgccttcgcctccaaccgcgtgcgctccacgcctcctccaggaaagcgagagcttctgcataagaacaacaaatcaaaagcgtgatcagctcggtgccaacaaaacctcaacaaccaagtttcatgtctgatctcgacgtccagcttccatctgcctttgatccgtttgctgaggcaaatgctgaggactctggtgctggtcctggaacgaaggattatgtgcatgtgcgcatccagcagcgcaacggcagaaagagtctgactacagtccagggtctgaagaaggagttcagctataacaagatcctcaaggatctgaagaaggaattctgctgcaatggtactgtagttcaggacccagagctaggccaggtcattcagctccaaggtgaccagcgcaagaatgttgctactttcctagttcaggctgggattgcgaagaaagagaacatcaagattcacgggttctaagggacctgtaaatgcttgtgccctatattgtgtgcctcaacatattggggagcttgaagcatcgacagttgctagtcattgcttacttatataagaacataagtagtatttgctattgtcaagtgtgccttgcttgatgcaagttgtgttttcgtctcattattattatgcacggccatcgtacgtgtatggcttgtatgggttattgccaacttaataaaagcacactctgtttgcccaaaaaaaaaaaaaaaaa

SEQ ID NO: 9132 - protein, 115 aa, Zea mays; identical to SEQ ID NO: 4770
  misc_feature: Ceres CLONE ID no. 1488142
  misc_feature: Ceres CDNA ID no. 25447072
  misc_feature: The plant flowers significantly earllier than wild-type.
  misc_feature: The plant is abnormally small.
  misc_feature: null
  misc_feature: Useful for making plants with modulated biomass
  misc_feature: Useful for making plants with modulated flowering time
  misc_feature (27)..(108): Pfam Name: SUI1 PFAM Desc: Translation initiation factor SUI1
  misc_feature: Homolog of GI Number: 53791638 NR Desc: putative translation initiation factor
  misc_feature: Homolog of GI Number: 50937977 NR Desc: translational initiation factor eIF1
  misc_feature: Homolog of GI Number: 6478142 NR Desc: putative translation initiation factor eIF
  misc_feature: Homolog of GI Number: 2668740 NR Desc: translation initiation factor
  misc_feature: Homolog of GI Number: 20218809 NR Desc: putative translation factor
  misc_feature: Homolog of GI Number: 21070377 NR Desc: translation initiation factor
  misc_feature: Homolog of GI Number: 3334346 NR Desc: Protein translation factor SUI1 homolog
  misc_feature: Homolog of GI Number: 4585973 NR Desc: translation initiation factor
  misc_feature: Homolog of GI Number: 28193048 NR Desc: SUI1 protein
  misc_feature: Homolog of GI Number: 57091083 NR Desc:  similar to Eukaryotic translation initiation factor 1
  misc_feature: Useful for accelerating flowering time
  misc_feature: Useful for increasing chlorophyll and photosynthetic capacity

SEQ ID NO: 9133 - DNA, 863 bp, Zea mays
  misc_feature: Ceres CLONE ID no. 1488262
  misc_feature: Ceres CDNA ID no. 25445691
  CDS (69)..(635): REFERENCED BY SEQ ID NO: 9134
gagagaatcggctcggacagtcggactcgatcatcaattaagcgaacctcgccgcgatcgtatcagccatggcgaccgccgcgcacgagggcgtgacccagcgcgtcgctgccagtggcagcagggacgacggcgccagcggcggcatcgcggcggtctcgggtcccaacaagaagccgggcggcggcaggaggcggcgcggcctccgttcggtcgccgccgcggtgtccatccccgcggcgctcgtggctctgtccttcttcgccgcgggccactccacgccgccgccgagttccgccacggtggcggtggtgcgggccgggtcggtggcgtcggaggcggtgctggcgctggcggcgtggatggcgtgggcagagggcgggctgcacgcgcgtccggccgccacgctgctgccctacgccgcgcggctcggcgccgcgctcgcgtgggcgccgctcgtgctgggccgccacgccgcggcgcgcgcgggcctcgcctgctgcgccgccatggccgtgggcgccgtggcgtgcgcgcgcggcttcggcgccgtcaaccctgtggctggcgacctcgccaagcccgccgtcgcctgggccgtcatcctcgccgtcgtcaactacaagatgctctgagctcccgagaacacgcgcgcgctgttcgtgttcgatcctcggcagccaggcccctggttatttgttgtgaacatgtaataatgcgttggtttgtgtacagtatacgttctgagtatgttgttgtgtcctgcatattcatctgagaatgcagccaggcccctcgtcaactacaagatgttcttaaatttcgattgcgatgtaacaatgtatgtgtaaaaaaaaaaaaaa

SEQ ID NO: 9134 - protein, 188 aa, Zea mays
  misc_feature: Ceres CLONE ID no. 1488262
  misc_feature: Ceres CDNA ID no. 25445691
  misc_feature: Homolog of GI Number: 50978430 NR Desc: peripheral
  misc_feature: Homolog of GI Number: 67984658 NR Desc: type II secretion system protein E
  misc_feature: Homolog of GI Number: 66780099 NR Desc: PE
  misc_feature: Homolog of GI Number: 66776103 NR Desc: LigA
  misc_feature: Homolog of GI Number: 66778264 NR Desc: LigA
  misc_feature: Homolog of GI Number: 53767310 NR Desc: COG1309: Transcriptional regulator
  misc_feature: Homolog of GI Number: 66776365 NR Desc: PE
  misc_feature: Homolog of GI Number: 67987580 NR Desc: ABC transporter
  misc_feature: Homolog of GI Number: 67639345 NR Desc: COG1020: Non
  misc_feature: Homolog of GI Number: 66776175 NR Desc: ABC
MATAAHEGVTQRVAASGSRDDGASGGIAAVSGPNKKPGGGRRRRGLRSVAAAVSIPAALVALSFFAAGHSTPPPSSATVAVVRAGSVASEAVLALAAWMAWAEGGLHARPAATLLPYAARLGAALAWAPLVLGRHAAARAGLACCAAMAVGAVACARGFGAVNPVAGDLAKPAVAWAVILAVVNYKML

SEQ ID NO: 9135 - DNA, 1001 bp, Zea mays
  misc_feature: Ceres CLONE ID no. 1488378
  misc_feature: Ceres CDNA ID no. 36591501
  CDS (359)..(646): REFERENCED BY SEQ ID NO: 9136
agactcatcagttcagttcaatccaatccaaattccaatcccacccagccccttccaagaactccagtcgtccaacaaaagcaggagtcgcatcccagaccccccgcaatcccgcatcagagacaggcagggagggaaccgagatctgtccgtccgtgtcgatggagtcaacggtggagcggataagctcgtcggtgcagtcctgggtgaaggaccacgagctcgcagccatcggtgagtcagtctcagccagcgagcgaccttgttgcagatatccaccactgctgcttagtgttccgtttccgtcgatgatcttctgctgaaactgaaactgaaaccgctagctgtctgcctgtctatgtgcgcgcgcgcgcgcccaggaggcgtgtgggctgcggcggcgggcgcttcggtggcgtacagccggaggaaggcgccgcagcggggcacgggcctgcgcctcatccacgccaggatgcacgcgcaggcgctcacgctcgccgtcctcggcggcgccgccctcttccactgctacggcgacggcggccgcaggaagagggccgacgacatcgacctcgacttctactcgcagctgccgccggcaaccgacgccgacggcaacgagaaccagcggtggagctggtaggaggaggagccgaggagaaggaagaactgtagcagactagcagtgggtgcttgcagcaataataattgaggtggggcctatgacgtggcgcgcgggagggattagtctgtgctaatcctaatccatcctacgacgggcggcccgtttacttaacattatcggtccatgctgtcatggccggcaccacatccacatctactagtcatctaggagcagccgcccatagtttgctgctgctgctgcttctctcctgtatcacagtactaccaccaccaccatttgtttatctgatgaatgaacggtggcgatgatgacgatattgtttatatcacgttttcatttaaaaaaaaaaaaa

SEQ ID NO: 9136 - protein, 95 aa, Zea mays
  misc_feature: Ceres CLONE ID no. 1488378
  misc_feature: Ceres CDNA ID no. 36591501
  misc_feature: Homolog of GI Number: 77553422 NR Desc: Hypoxia induced protein conserved region
  misc_feature: Homolog of GI Number: 77548353 NR Desc: anaerobically inducible early gene 2
  misc_feature: Homolog of GI Number: 3282394 NR Desc: anaerobically inducible early gene 2
MCARARPGGVWAAAAGASVAYSRRKAPQRGTGLRLIHARMHAQALTLAVLGGAALFHCYGDGGRRKRADDIDLDFYSQLPPATDADGNENQRWSW

SEQ ID NO: 9137 - DNA, 1100 bp, Glycine max
  misc_feature: Ceres CLONE ID no. 1489583
  misc_feature: Ceres CDNA ID no. 36519569
  CDS (106)..(903): REFERENCED BY SEQ ID NO: 9138
ctcattctttgtcatcccggcggcggcgcgttgcacaggagaaggagcaggcggcggcggtgcccgaagaggagaagcacggcgacctagcccgagctcgcaaccatggctaggggtttgaagaagcatctgaagaggctcaatgccccgtctcattggatgcttgacaagcttggtggagcttttgcccccaagccatcatccggtcctcacaaggccagggagtgcctgcctctgatcctcatcctgaggaacagactgaaatatgctctcacctaccgtgaagtgcaatctatccttatgcagcgtcatattatggttgatggaaaggtccgcactgacaagacctaccctgctggtttcatggacatcatttccattcccaagactggtgagaactacaggcttctgtatgacaccaagggtcgcttccgccttcactctgtcagggacgaggatgctaagttcaagctctgcaaggtcaggtctgtccagtttggccagaagggcatcccatacctcaacacctatgatggccgcaccatccgctacccagacccactcatcaaggccaatgacaccatcaagcttgacctggagaccaacaagattgttgacttcatcaagtttgacgtcggcaacgtggtcatggtgactggtgggcgcaacactgggcgtgttggtgtgatcaagaacagggagaagcataagggaaccttcgagaccatccacgttgaggatgcccagggccaccagttcgccacccgtctgggcaacgtgttcaccatcggcaagggcaccaagccgtgggtgagcctccccaagggcaagggtatcaagctcaccatcattgaggagcagaggaagcgggatgccgctgcccaggctgctgccaaggcctgattctgaggtgttgagtcgttttgctatagccagttatctgcaaggatatagacctatgttcctggaaccatcgtttttaagttttgcctgatgtttgttgatttgcgaactcgtggttgctgctagatgtaatgtggatgtttaccttattaagcgctatttcgagacctaaaaaaaaaaaaaaaaaaaaaaaaaaa

SEQ ID NO: 9138 - protein, 265 aa, Glycine max; identical to SEQ ID NO: 7134
  misc_feature: Ceres CLONE ID no. 1489583
  misc_feature: Ceres CDNA ID no. 36519569
  misc_feature (175)..(211): Pfam Name: KOW PFAM Desc: KOW motif
  misc_feature (3)..(40): Pfam Name: RS4NT PFAM Desc: RS4NT
  misc_feature (42)..(90): Pfam Name: S4 PFAM Desc: S4 domain
  misc_feature (94)..(170): Pfam Name: Ribosomal_S4e PFAM Desc: Ribosomal family S4e
  misc_feature: Homolog of GI Number: 53791616 NR Desc: putative 40S ribosomal protein S4
  misc_feature: Homolog of GI Number: 50252099 NR Desc: putative ribosomal protein S4
  misc_feature: Homolog of GI Number: 44894458 NR Desc: ribosomal protein S4
  misc_feature: Homolog of GI Number: 2331301 NR Desc: ribosomal protein S4 type I
  misc_feature: Homolog of GI Number: 48596901 NR Desc: ribosomal protein
  misc_feature: Homolog of GI Number: 2345154 NR Desc: ribsomal protein S4
  misc_feature: Homolog of GI Number: 73759787 NR Desc: ribosomal protein S4
  misc_feature: Homolog of GI Number: 22138108 NR Desc: 40S ribosomal S4 protein
  misc_feature: Homolog of GI Number: 457803 NR Desc: ribosomal protein S4
  misc_feature: Homolog of GI Number: 82400118 NR Desc: 40S ribosomal protein S4

SEQ ID NO: 9139 - DNA, 788 bp, Zea mays
  misc_feature: Ceres CLONE ID no. 1489893
  misc_feature: Ceres CDNA ID no. 25446148
  CDS (89)..(574): REFERENCED BY SEQ ID NO: 9140
accctagcctccggatccatccatccgcccctcgctgccgctgcgtctcgtctccaccaccccacttgcccccggaggatcgtcggagatgtcggacaccgatgagcaccacttcgagtccaaggccgactccggcgcctccaagacctacccgcagcaggccggcgccatccgcaagggtggacacatcgtcatcaaggcccgtccctgcaaggttgttgaggtctccacctccaagactgggaagcatggtcacgcaaagtgtcactttgttgccattgacatctttaatggaaagaagcttgaggatatcgttccttcatcccacaactgtgacgtcccccatgttgaccgccaagattatcagctgattgacataactgatgatggatatgtcagccttctaactgagagtggcaacacgaaggatgacctgaagcttcccactgatgatgttctgcttggccagatcaagactggatttgctgatggcaaggacctgatcctgtctgtgatgtccgccatgggtgaagaacagatctgcactgtgaaggaaatcggtggtggcaagtaagcagctgtgcgtggttgcctacctgcgatacttggtatctagtgcttctgggtgtttgagatacacatacataggcatcaagatatctgttgggtgaaacaagtttgatccagatttgtgtgttttttacaccgaatgctcgaggtgctgctagtactttgttatctatctatctatctctattataatacccttttgaaaaaaaaaaaaaaaa

SEQ ID NO: 9140 - protein, 161 aa, Zea mays
  misc_feature: Ceres CLONE ID no. 1489893
  misc_feature: Ceres CDNA ID no. 25446148
  misc_feature (28)..(64): Pfam Name: KOW PFAM Desc: KOW motif
  misc_feature (86)..(155): Pfam Name: eIF PFAM Desc: Eukaryotic initiation factor 5A hypusine
  misc_feature: Homolog of GI Number: 74048999 NR Desc: eukaryotic translation initiation factor 5A1
  misc_feature: Homolog of GI Number: 78191549 NR Desc: translation initiation factor 5A
  misc_feature: Homolog of GI Number: 74049022 NR Desc: eukaryotic translation initiation factor 5A2
  misc_feature: Homolog of GI Number: 74049040 NR Desc: eukaryotic translation initiation factor 5A3
  misc_feature: Homolog of GI Number: 78191545 NR Desc: translation initiation factor 5A
  misc_feature: Homolog of GI Number: 50938957 NR Desc: translation initiation factor 5A
  misc_feature: Homolog of GI Number: 12407787 NR Desc: eukaryotic translation initiation factor 5A
  misc_feature: Homolog of GI Number: 2225885 NR Desc: eukaryotic initiation factor 5A5
  misc_feature: Homolog of GI Number: 34915268 NR Desc: putative translation initiation factor 5A
  misc_feature: Homolog of GI Number: 2225887 NR Desc: eukaryotic initiation factor 5A1
  misc_feature: Useful for increasing chlorophyll and photosynthetic capacity
  misc_feature: Useful for making plants that grow better in shade
  misc_feature: Useful for making plants with increased biomass and foliage
  misc_feature: Useful for making plants with increased biomass and foliage
  misc_feature: Useful for making shorter plants
  misc_feature: Useful for making shorter plants and plants with modified flowers
MSDTDEHHFESKADSGASKTYPQQAGAIRKGGHIVIKARPCKVVEVSTSKTGKHGHAKCHFVAIDIFNGKKLEDIVPSSHNCDVPHVDRQDYQLIDITDDGYVSLLTESGNTKDDLKLPTDDVLLGQIKTGFADGKDLILSVMSAMGEEQICTVKEIGGGK

SEQ ID NO: 9141 - DNA, 885 bp, Zea mays
  misc_feature: Ceres CLONE ID no. 1489970
  misc_feature: Ceres CDNA ID no. 40351997
  CDS (73)..(738): REFERENCED BY SEQ ID NO: 9142
aaaaaacatctttctccacgcacacacaaaacacacaaacccatcgcctgagattctctcgattccgacaacatggctctacctaaccagcaaaccgtcgattaccctagcttcaagctcgtcattgttggtgacggaggcacaggaaaaacaactttcgtcaagagacatcttactggagagttcgagaagaagtatgaacctacaattggtgtggaggttcatcctctagatttcttcacaaactgtggcaagatccgtttctactgctgggacactgctggtcaagagaagttcggtggccttagagatggttactacatccatggtcaatgtgcggttatcatgttcgacgtgacggcgcggctcacatacaagaacgtccccacgtggcaccgtgacctctgccgtgtgtgtgagaacatccccatcgttctctgcgggaacaaggtcgatgtgaagaacaggcaagtgaaggccaagcaggtgacgtttcacaggaagaagaatcttcagtactacgagatctccgcgaagagtaactacaactttgagaagcccttcttgtacctcgctaggaagcttgcgggggaccagaaccttcactttgttgagtcgccggctcttgctccccctgaggttcacattgacgttgctgagcagcagaggaacgaggctgatctcattgccgcagccgctcagcctcttccagatgatgatgatgatgcttttgagtaaaagaagagcttcttccactatgtctgccatgggaagctgtttgcgttgtctgattctctatttgtgtttttttttttggtttttttaacatgttgggggaaatattgtttaagattgtttcgttttggaataaaaaaaaaaaaaaaa

SEQ ID NO: 9142 - protein, 221 aa, Zea mays
  misc_feature: Ceres CLONE ID no. 1489970
  misc_feature: Ceres CDNA ID no. 40351997
  misc_feature (15)..(173): Pfam Name: Ras PFAM Desc: Ras family
MALPNQQTVDYPSFKLVIVGDGGTGKTTFVKRHLTGEFEKKYEPTIGVEVHPLDFFTNCGKIRFYCWDTAGQEKFGGLRDGYYIHGQCAVIMFDVTARLTYKNVPTWHRDLCRVCENIPIVLCGNKVDVKNRQVKAKQVTFHRKKNLQYYEISAKSNYNFEKPFLYLARKLAGDQNLHFVESPALAPPEVHIDVAEQQRNEADLIAAAAQPLPDDDDDAFE

SEQ ID NO: 9143 - DNA, 940 bp, Zea mays
  misc_feature: Ceres CLONE ID no. 1489976
  misc_feature: Ceres CDNA ID no. 36593709
  CDS (149)..(505): REFERENCED BY SEQ ID NO: 9144
attcgtccccgacctaaggaagcggaccccggccaacgctcctgacagattcgcccggccgacgctcccttcgattccgtcctctcgcccgcgctccgcagcaggtgtgtaagacatcttcagcataccatctggtccgtccctggaaatgtccggcgtccaggagcagttcgagatcaagttccggctgccggacggcatcgacatcgggcccaggcgcttcccgccggcgtccaccgtcgctacgctcaaggagaccatcatcgcccagtggcccaaagataaggagaaaggtcctaggactgtgaacgatcttaagcttattaacgctgggaagatactggagaacaacaaaaccctgtcagaatgcaaaagtccgatctgtgacttctctgggatgacaacgatgcatgtcgtcgtccgcgcaccgacttcaagcaaacagtctggtaaaagagcagcaacgaaagcgaaaggtttcaggtgcggttgtgccattatgtgacagagaatgccagttttctccctttttccgctcttgctggagtgttgtatcatgtttgaggcgctttctccttttatttccttttcaagtattgtgggtaagcttaggtatacaatcactcattttggtgcaagcgtgcaatcaaactatccagagcatccaatctagatccaacggtttcatatggaagtggttaaaattaaaataggtactatgttttaggtgtaagaggttaaatataaaataacagtcatcattagatctagatcggatgcaccagatcgcttgattgcatgcttgcaccaggataagtgatggcataggatattttcccgcggttaagtgcccattaatcacgagtttgcatcgaacacaaaattggaaggcagcttgctgctaattacccttaatcttaagttaaaaaaaaaaaaaaaa

SEQ ID NO: 9144 - protein, 118 aa, Zea mays
  misc_feature: Ceres CLONE ID no. 1489976
  misc_feature: Ceres CDNA ID no. 36593709
  misc_feature: Homolog of GI Number: 50912815 NR Desc: putative NTGP5
  misc_feature: Homolog of GI Number: 25402954 NR Desc: protein F2E2.12
  misc_feature: Homolog of GI Number: 46015773 NR Desc: Chain A
  misc_feature: Homolog of GI Number: 4097587 NR Desc: NTGP5
  misc_feature: Homolog of GI Number: 21592966 NR Desc: ubiquitin
MSGVQEQFEIKFRLPDGIDIGPRRFPPASTVATLKETIIAQWPKDKEKGPRTVNDLKLINAGKILENNKTLSECKSPICDFSGMTTMHVVVRAPTSSKQSGKRAATKAKGFRCGCAIM

SEQ ID NO: 9145 - DNA, 494 bp, Zea mays
  misc_feature: Ceres CLONE ID no. 1490074
  misc_feature: Ceres CDNA ID no. 36706885
  CDS (3)..(317): REFERENCED BY SEQ ID NO: 9146
agacatcgcacaagactcttgtcaacaagaccaacaacaggatgaggactgccgtgcatgctgcgctttgcattgtgcttgtgataatgtcttcaacactgtcatcttgcgaggacgatgagaaggtatctatcgcatgtgacacaggatgcaatgccgcgatctcccgtctcaaatgcttcctgatggcctattctgaagggaaagtgttggtcagcagcaactgcgaaacgccgaccaggtgcggctgcgtgtttcgtcacaaacaagatgcagcccttatcgccggcgacgttggcaacaaaaagggatactgatggcagacgtgtacttcttggttgaataatactgctagaattaatatgggcaccaacgaaatatctataatgttattcttcagtgtaatgcttccagcatgttctgatttagtttaactaaatatctatctttccccccaatttaagttttttttgttctcaaaaaaaaaaaaaaaa

SEQ ID NO: 9146 - protein, 91 aa, Zea mays; identical to SEQ ID NO: 5620
  misc_feature: Ceres CLONE ID no. 1490074
  misc_feature: Ceres CDNA ID no. 36706885

SEQ ID NO: 9147 - DNA, 718 bp, Zea mays
  misc_feature: Ceres CLONE ID no. 1490232
  misc_feature: Ceres CDNA ID no. 25446149
  CDS (74)..(448): REFERENCED BY SEQ ID NO: 9148
gtgccagtttcgttctcatctccgttctctggattgtcccccgctcccctcttccggtcttccactcttccccatgtcggacgcgtataggaaagccaagcccggccgcctcgtcttcaagggcggcgaagccgcctccatccacaagccaaagaagcacaagaagaataagaagcccgcgtcggacgccctcgccgacggcgacatcgaggccgcagccgcggccgcggagggtgctgaaggcggcggaggtgccggcagcggcactggcgacgactacaccatcgacgcggcgaagaagatgaagtacgaggaactcttccctgtggagtcgaagaagttcgggtatgaccccgacaacgccgcccgcgctgccgcccggaaccgcaccgtcgaggaagccctcgacgaccgcgtccgcaagaaggccgaccgctactgcaaatgaggttcactcattggtcattgctgttgtttgcagctgtattgctcagtgtattgaagatggcctctttggagaattatgatccttcacggcatgttgtttagtagtcaaagtgctagtcaagcattttccttatgcatatttgtactagtaattagcaaacataaggattcttgcacatgttattccgataaacttgttctgccctctttgggttgattaagagaatactaccgcctggagattgtttattttgtaaaaaaaaaaaaaaaa

SEQ ID NO: 9148 - protein, 124 aa, Zea mays; identical to SEQ ID NO: 8380
  misc_feature: Ceres CLONE ID no. 1490232
  misc_feature: Ceres CDNA ID no. 25446149
  misc_feature: Homolog of GI Number: 50927997 NR Desc: OSJNBa0017B10.17

SEQ ID NO: 9149 - DNA, 573 bp, Zea mays
  misc_feature: Ceres CLONE ID no. 1490236
  misc_feature: Ceres CDNA ID no. 25446150
  CDS (106)..(396): REFERENCED BY SEQ ID NO: 9150
cgccatcatctcatcgatcacacacacccatacgccgcgaatccacacgcatctccctctccagtctccagttctccaccttgccagcgtctctccacgtacgccatggacgggtcggcgttcccgtcgctgtcgccggagctccgcgacgcgctcgccaaggtggccgtgttcgtgctcgtccaggggctggtctacctcatcctccgcagctcctccgacgtcttctccaaggacggccggctcaggtccctcagcttccgccccatgcgctccatgagcgtcaggcgcgtgctggcgccgctctccgacgtccccgtcggcaccgacgacgcctctccatcgttgtcgcccgccgcgacgtcgtcgcaccgcaaagctgcccgcgaggattgaaatggccgccacttctgggcagcttgcagttgcaggttgttcatctggtccttatgggttataaatgggtctgttactatgtaattaagtagtactatattggatggaatcttgtagacatattggttgagcagaattggaaacactggattatttgattcaaaaaaaaaaaaaaaa

SEQ ID NO: 9150 - protein, 96 aa, Zea mays
  misc_feature: Ceres CLONE ID no. 1490236
  misc_feature: Ceres CDNA ID no. 25446150
MDGSAFPSLSPELRDALAKVAVFVLVQGLVYLILRSSSDVFSKDGRLRSLSFRPMRSMSVRRVLAPLSDVPVGTDDASPSLSPAATSSHRKAARED

SEQ ID NO: 9151 - DNA, 830 bp, Zea mays
  misc_feature: Ceres CLONE ID no. 1490254
  misc_feature: Ceres CDNA ID no. 25445934
  CDS (171)..(590): REFERENCED BY SEQ ID NO: 9152
actaagagagagaaacttctcttccagaagggggcaaagctcgcggcctcgcgtcgcgccggtcgttccggtccaacgcggcgacgccaaaggctgccgtccccgggcttcctcctccccctcgccaaaccacaggaagaagcgagcagggcaccgtgttttctcgatcgatggcatcggcgcctgccgattcctacgggtgcgcggcgtgcggcgcgctcctggacctgtcggcggcgcacctgtacccggcggacttctacttcgaggccgggaacaagggcacgctgtccttctcgtgggtggacgagtcgcgcctgcggttcgcgcccgaggaccgcatccgccccttcttcgagaccctcaactactggggcatccagcggaagcgcacgcgcatcagctgcgacgcctgcggccacctgcttggccacgtctacgacgacggtccgccggccatgcagggcaccggccagttcgggatggggcccagccaggtcatcccgcgccgccccaggtaccgcttcaagatcaaggccatcgccgccagctcctcggcacctgccgccgccgccgcctatggaaagtgatgctccatagatttcctgtgtactcataattgtatgtgtctcttttacttagaagtcctaagacatagatgaaaagaaaacattagcctatttgtcatggtattttcctctaatattcctatacctcgttcataggaatttcaaaggaactcataagattcaagcctcctttggagtgtagtaaattttactgttccttgaactaatttatgtgaaattcatgtaaaaaaaaaaaaaaaa

SEQ ID NO: 9152 - protein, 139 aa, Zea mays
  misc_feature: Ceres CLONE ID no. 1490254
  misc_feature: Ceres CDNA ID no. 25445934
  misc_feature: Homolog of GI Number: 34908010 NR Desc: P0460C04.15
  misc_feature: Homolog of GI Number: 11345048 NR Desc: SCAN domain
  misc_feature: Homolog of GI Number: 15991823 NR Desc: SCAN domain
  misc_feature: Homolog of GI Number: 55665421 NR Desc: novel protein
  misc_feature: Homolog of GI Number: 38014340 NR Desc: PPRC1 protein
  misc_feature: Useful for increasing increasing anthocyanin content
MASAPADSYGCAACGALLDLSAAHLYPADFYFEAGNKGTLSFSWVDESRLRFAPEDRIRPFFETLNYWGIQRKRTRISCDACGHLLGHVYDDGPPAMQGTGQFGMGPSQVIPRRPRYRFKIKAIAASSSAPAAAAAYGK

SEQ ID NO: 9153 - DNA, 530 bp, Zea mays
  misc_feature: Ceres CLONE ID no. 1490264
  misc_feature: Ceres CDNA ID no. 40351998
  CDS (36)..(332): REFERENCED BY SEQ ID NO: 9154
atagattccaaagccagccaaccatctaatcagtaatggaggggctcatcccgttcgtctacaaggccatcaaggagcggcgcacccggagctactccaggtgcggctcggcgcgcggcgccgccgtcgcggacgaggacgacgtctgggagcagcagaagcagcagtgggcggcggcggacggcgcggggagggaggcggggcaccggcggcaccggtcgctggaggagctggccggcgaggtgggctccgcggcgcccgagtggccggcccgcggggcgatgcgccggggccggagcgccaggatcttctcctgcatcggcggcatgtgatcaatacgtatgaatgatacgtgctgctggtgctctgcctgctttgtttagctactactttagccgtgcctgtaaggtaaggttcatggtgatttgaagacgaagagtagtacgtagaagagtctgtgtggtgcgcgcgtgttgtgtgtactccagccaaagtgtatatacatgggtttgacaaaaaaaaaaaaaaaa

SEQ ID NO: 9154 - protein, 98 aa, Zea mays
  misc_feature: Ceres CLONE ID no. 1490264
  misc_feature: Ceres CDNA ID no. 40351998
MEGLIPFVYKAIKERRTRSYSRCGSARGAAVADEDDVWEQQKQQWAAADGAGREAGHRRHRSLEELAGEVGSAAPEWPARGAMRRGRSARIFSCIGGM

SEQ ID NO: 9155 - DNA, 684 bp, Zea mays
  misc_feature: Ceres CLONE ID no. 1490319
  misc_feature: Ceres CDNA ID no. 25446151
  CDS (45)..(539): REFERENCED BY SEQ ID NO: 9156
agttcggcggcttctatcagtttcacttgttcgcacgggaaaaaatgccggcaggacatggagttcgtgctagaacaagagatctgttcgcgagggggttcaggaagaagggtacaattccactgtccacctacctaaggaccttcaaggtcggcgaatacgtcgatgtcaaagtgaacggtgcgatacacaagggtatgcctcacaagttctaccacggtcgtactggtcgcgtctggaacgttaccaaacgtgccgttggtgtcgaagtcaacaaacagattggaaacaggatcataaagaagaggcttcatgtgcgtgtggagcacgtgcagcagtctagatgcgcggaagagttcaaactgaggataaggaagaacgatgagctcaaagctgctgctaaagcaagaggcgagacaataagcaccaagaggcagcctaaaggacccaaaccaggattcatggttgaaggtatgaccttggagacagtcactcctatcccctacgacgtcgtcaacgatctcaagggaggctattagttcttttctactttctctcctgttcttgctgtgtgttttggaactctgcatttgtagccacttgaactaaagaatatgatttatatgagaattttttggagtccagattttcattttgtgtggaatgttaaaaaaaaaaaaaaaa

SEQ ID NO: 9156 - protein, 164 aa, Zea mays
  misc_feature: Ceres CLONE ID no. 1490319
  misc_feature: Ceres CDNA ID no. 25446151
  misc_feature: null
  misc_feature: Useful for making plants with modulated flowering time
  misc_feature (2)..(100): Pfam Name: Ribosomal_L21e PFAM Desc: Ribosomal protein L21e
  misc_feature: Homolog of GI Number: 3482935 NR Desc: Putative ribosomal protein L21
  misc_feature: Homolog of GI Number: 12321346 NR Desc: 60S ribosomal protein L21
  misc_feature: Homolog of GI Number: 31432571 NR Desc: 60S ribosomal protein L21
  misc_feature: Homolog of GI Number: 3885884 NR Desc: 60S ribosomal protein L21
  misc_feature: Homolog of GI Number: 32400808 NR Desc: 60s ribosomal protein L21
  misc_feature: Homolog of GI Number: 76161012 NR Desc: 60S ribosomal protein L21
  misc_feature: Homolog of GI Number: 45190353 NR Desc: AEL254Wp
  misc_feature: Homolog of GI Number: 54292803 NR Desc: ribosomal protein L21
  misc_feature: Homolog of GI Number: 15213768 NR Desc: ribosomal protein L21
MPAGHGVRARTRDLFARGFRKKGTIPLSTYLRTFKVGEYVDVKVNGAIHKGMPHKFYHGRTGRVWNVTKRAVGVEVNKQIGNRIIKKRLHVRVEHVQQSRCAEEFKLRIRKNDELKAAAKARGETISTKRQPKGPKPGFMVEGMTLETVTPIPYDVVNDLKGGY

SEQ ID NO: 9157 - DNA, 745 bp, Zea mays
  misc_feature: Ceres CLONE ID no. 1490336
  misc_feature: Ceres CDNA ID no. 25445711
  CDS (113)..(460): REFERENCED BY SEQ ID NO: 9158
agtccaccaccacacaagaagaggcccccagtccccagccagtccacagctctccactcgagaaacctccagtccagctccacccttcgtccagaggcacaacacacacaccatggctcccagcaagcttgcggtggtcgtcgccttggtagcgtcgctcctcctgctcaccaccagcaacaccaagcttggcctgttcgtgctcggccaggctgctccgggcgcctacccaccacgggctcctccgccgcaccagatcgtcgacctcgccaaagactgcgggggcgcgtgcgacgtgcggtgcggcgcgcactcgcgcaagaacatctgcacccgggcgtgcctcaagtgctgcggcgtctgccgctgcgtgccggcgggcactgccggcaaccagcagacgtgcggcaagtgctacaccgactggaccacgcacggcaacaagaccaagtgcccgtgactccttgtccttgacgagagcagcatgagtccatgggcccactggcgccacgttttgtatgatccgaccccgtcggcgtagatgtccgagcctgtagctatctagcttagatgtacgaggttgatgtgctctgctgtttgttttttgctagtacttctagtttgtatctttgtgttgacgttgatgggtctgtgttcctgtgtaaaaaaaaaaaagaagaagtgtgcgatgcgtttcgcgtagcagtaaaatccatgcatctgggttggaaaaaaaaaaaaaaaa

SEQ ID NO: 9158 - protein, 115 aa, Zea mays
  misc_feature: Ceres CLONE ID no. 1490336
  misc_feature: Ceres CDNA ID no. 25445711
  misc_feature (54)..(115): Pfam Name: GASA PFAM Desc: Gibberellin regulated protein
  misc_feature: Homolog of GI Number: 50924884 NR Desc: OSJNBa0060P14.17
  misc_feature: Homolog of GI Number: 2253442 NR Desc: LTCOR11
  misc_feature: Homolog of GI Number: 14625945 NR Desc: snakin2
  misc_feature: Homolog of GI Number: 44889867 NR Desc: GASA
  misc_feature: Homolog of GI Number: 14625943 NR Desc: snakin2
  misc_feature: Homolog of GI Number: 3094012 NR Desc: cold
  misc_feature: Homolog of GI Number: 2792297 NR Desc: GAST
  misc_feature: Homolog of GI Number: 5102600 NR Desc: GEG protein
  misc_feature: Homolog of GI Number: 25313155 NR Desc: protein F10A5.6
MAPSKLAVVVALVASLLLLTTSNTKLGLFVLGQAAPGAYPPRAPPPHQIVDLAKDCGGACDVRCGAHSRKNICTRACLKCCGVCRCVPAGTAGNQQTCGKCYTDWTTHGNKTKCP

SEQ ID NO: 9159 - DNA, 922 bp, Zea mays
  misc_feature: Ceres CLONE ID no. 1490340
  misc_feature: Ceres CDNA ID no. 25892903
  CDS (120)..(734): REFERENCED BY SEQ ID NO: 9160
ataaataccagtgcctccgtgtcttctcaattttcaccagccatagtcatacagcgacaataaggagagcaaattagaagcacagatcaaggggaagagaactccgcggctgatcagcaatggcgaccaagatctacatagtgtactactcgacctggggacacgtcgcgacgctggcggaggagatgaagaagggcgccgactccgtccccggcgtcgaggtcaccgtctggcgggtgccagagacgctgccagaggaggtgctcgggaagatgcacgcggcgccggggcgcgaggaccacccggtcatcacggcgagccagctggccgaggccgacggcatcctgttcggcttcccgacgcggttcggcatgatggcggcgcagatgaaggccttcttcgactccaccggcggcctctggcaggcacagagcctctcgggcaagcccgcgggcgtcttcttcgcgacgggcacccagggcggcgggcaggagaccacggctctcacggccgtgacgcagctgacgcaccacggcatgctgttcgtgccggtcgggtacacgcacggcgccggcatgttcgccatggacgaggtcaagggtggcagcccgtacggtgccggcaccttcgctggagccgatggcagcagggtgcccagcgatgccgagctcgccctcgcggcgcaccagggcaagtactttgccggcatcgccaagaagctcaaagccgtctgaactccgatcaccagccgtgtcccatgactcatatcaactactcaatcattacaagatgatttgacacatcattttcagtggagcagatttacataattctagacaattaaactgtactgcatttaatttcttgtttggacaaataatacaatttcttgttctgagtggagctaaaaaaaaaaaaaaaa

SEQ ID NO: 9160 - protein, 204 aa, Zea mays
  misc_feature: Ceres CLONE ID no. 1490340
  misc_feature: Ceres CDNA ID no. 25892903
  misc_feature (7)..(139): Pfam Name: Flavodoxin_1 PFAM Desc: Flavodoxin
  misc_feature: Homolog of GI Number: 53749369 NR Desc: 'putative 1
  misc_feature: Homolog of GI Number: 58500257 NR Desc: quinone reductase 2
  misc_feature: Homolog of GI Number: 12484052 NR Desc: quinone
  misc_feature: Homolog of GI Number: 34910128 NR Desc: putative 1
  misc_feature: Homolog of GI Number: 50940963 NR Desc: putative quinone
  misc_feature: Homolog of GI Number: 21068664 NR Desc: putative quinone oxidoreductase
  misc_feature: Homolog of GI Number: 21539481 NR Desc: 1
  misc_feature: Homolog of GI Number: 2564066 NR Desc: LEDI
  misc_feature: Homolog of GI Number: 21593010 NR Desc: minor allergen
MATKIYIVYYSTWGHVATLAEEMKKGADSVPGVEVTVWRVPETLPEEVLGKMHAAPGREDHPVITASQLAEADGILFGFPTRFGMMAAQMKAFFDSTGGLWQAQSLSGKPAGVFFATGTQGGGQETTALTAVTQLTHHGMLFVPVGYTHGAGMFAMDEVKGGSPYGAGTFAGADGSRVPSDAELALAAHQGKYFAGIAKKLKAV

SEQ ID NO: 9161 - DNA, 692 bp, Zea mays
  misc_feature: Ceres CLONE ID no. 1490937
  misc_feature: Ceres CDNA ID no. 25446153
  CDS (124)..(522): REFERENCED BY SEQ ID NO: 9162
ataaacccttgaccgggagacggaaaaccccaacgccggcaagaaccgcccctcgcaagcaatcgcttgctcgtcgcgctcgaatcccgcgcgttcgcgggagcggcgaggaggaggaggagcatggccgggaagggaggagggaagtcgctggtcgccgcgaagatagcggctggcatggacaaggacaagaagtcgccggtcaaccgctccgcgcgcgccggcctccatttccctgtgggacgcatccaccgccacctgaaggatagcgcacaggccggcgagcgggtgggggcgacggcggccgtgtacgcggcggccgtcctggagtacctgacggcggagatcatggagctggccgggaacgcgtgcagggacctcaaggtgaagcgcatcaccccgcggcacctccagctggcggtacgcggggacgaggagctggacaccctgatcaaggccaccatcgccggcggcggcgtcatcccccacatccacagggagctcatcgacaaggctgcctaggaatgaccaaggagcaagcagtctgttaaaaaaacctgagaaccaagtagtaccatgaacctcttgtgggtggcttcgctcttgttgcgttgtcaatctgctgatacatacacatttctcaaaaatagaggcgggcactcgccgcttcatgcacaaaaaaaaaaaaaaaa

SEQ ID NO: 9162 - protein, 132 aa, Zea mays
  misc_feature: Ceres CLONE ID no. 1490937
  misc_feature: Ceres CDNA ID no. 25446153
  misc_feature (29)..(105): Pfam Name: Histone PFAM Desc: Core histone H2A/H2B/H3/H4
  misc_feature: Homolog of GI Number: 50918585 NR Desc: putative histone H2A protein
  misc_feature: Homolog of GI Number: 21592838 NR Desc: histone H2A.F/Z
  misc_feature: Homolog of GI Number: 34902610 NR Desc: Putative histone H2A
  misc_feature: Homolog of GI Number: 31432099 NR Desc: putative histone H2A
  misc_feature: Homolog of GI Number: 21536635 NR Desc: putative histone H2A
  misc_feature: Homolog of GI Number: 21595470 NR Desc: histone H2A
  misc_feature: Homolog of GI Number: 6319146 NR Desc: H2A protein
  misc_feature: Homolog of GI Number: 56500163 NR Desc: histone H2A variant
  misc_feature: Homolog of GI Number: 16805290 NR Desc: histone H2A variant
  misc_feature: Homolog of GI Number: 62087582 NR Desc: H2A histone family
  misc_feature: Useful for making ornamental plants with modified flowers
MAGKGGGKSLVAAKIAAGMDKDKKSPVNRSARAGLHFPVGRIHRHLKDSAQAGERVGATAAVYAAAVLEYLTAEIMELAGNACRDLKVKRITPRHLQLAVRGDEELDTLIKATIAGGGVIPHIHRELIDKAA

SEQ ID NO: 9163 - DNA, 597 bp, Zea mays
  misc_feature: Ceres CLONE ID no. 1490949
  misc_feature: Ceres CDNA ID no. 25446154
  CDS (71)..(382): REFERENCED BY SEQ ID NO: 9164
agaagaacatcaaatacatactggctcactcgtgattccttcacccagctccagctaaatcatcaaaaagatgcccccctgcaaagtagcagcagtcttactcgtgttgatcacaacaatttctgtcaacaccgtaactgggtcgcgatgcaacgctcaggagaagaaccagattgtgagcttgtgccaaatgtacatccagagaggaaccctcgttcagctcccatcccaaactgggccatgctgtgcggcagtgagagagctagagagggtacacaggggtatgcagatgaagtgcatcgccgatctactaaacgctggagacctgcagaaatacgatccaactaagatcaagcatcttgacatttcctgctacacttaacacatcgttagtttcattcctctcctccccatcgttgtaaggtcatgctgtgaagggcgcgatggcgtggaatggatggtggtggtagcaaagatgctcagaagatgacatttcgttagttatttaattaagtcttccaaggcgtcaatcttcctgacatgtatctttattcgaaaaaataaactggattatttctggtaaaaaaaaaaaaaaaa

SEQ ID NO: 9164 - protein, 103 aa, Zea mays
  misc_feature: Ceres CLONE ID no. 1490949
  misc_feature: Ceres CDNA ID no. 25446154
  misc_feature: Homolog of GI Number: 5042333 NR Desc: BETL4 protein
MPPCKVAAVLLVLITTISVNTVTGSRCNAQEKNQIVSLCQMYIQRGTLVQLPSQTGPCCAAVRELERVHRGMQMKCIADLLNAGDLQKYDPTKIKHLDISCYT

SEQ ID NO: 9165 - DNA, 877 bp, Zea mays
  misc_feature: Ceres CLONE ID no. 1490976
  misc_feature: Ceres CDNA ID no. 36593098
  CDS (128)..(703): REFERENCED BY SEQ ID NO: 9166
aaaaaccgtgcccctccgtcccaaccgtccgccgcctccctccctccctccctttccgctccgccaagaccctcctcctcaccccactcacccagctcccctcgagcccagaagcaccgcgcgcaccatgcggccaccgagagggcgcggcggcggcggccggttcggcggaggtggaggccgaggcggcggcggtggccggttcggcggcggaggccgtggtggccggttcggcggcgggttccgcgacgagggcccgcccgcagaggtcgtcgaggtgtcgacgttcgtgcacgcgtgcgagggagacgcggtgacgaaactcaccaacgagaaggtgccctacttcaacgcgcccatctacctgcagaacaagactcaggtcggcaaggtcgacgagatcttcggccccatcaacgaatcctatttctctgtgaagatgatggaagggatcattgcaacatcgtacaaggaaggcgacaagttctatatcgacgccatgaaattgctgcctctttcgcgcttcctgccgcaaccaaagggacaatctcaaggagcacctagaggtggtggccgtggtggaaggggtggtggcagaggccgtggtggttcgttccgtggtggaagaggaccaccaaggggtggtggccgaggtccaaggggtggtggccgtggtggttttagagggcgaggaaggttctaggtgtagtttgagtttgatgatgttttttgttgaagcatcatagctacccaattggaaacttccatgttcttgtaacctgatatgtttaaggtagcagaacattttgtttgtggaacttggattctcaattgaaacaaagggtttgtacctgttccgttaaaaaaaaaaaaaaaa

SEQ ID NO: 9166 - protein, 191 aa, Zea mays
  misc_feature: Ceres CLONE ID no. 1490976
  misc_feature: Ceres CDNA ID no. 36593098
  misc_feature (41)..(142): Pfam Name: Gar1 PFAM Desc: Gar1 protein RNA binding region
  misc_feature: Homolog of GI Number: 20259633 NR Desc: putative GAR1 protein
  misc_feature: Homolog of GI Number: 21536739 NR Desc: putative GAR1 protein
  misc_feature: Homolog of GI Number: 68565880 NR Desc: H/ACA ribonucleoprotein complex subunit 1
  misc_feature: Homolog of GI Number: 74002354 NR Desc:  similar to nucleolar protein family A
  misc_feature: Homolog of GI Number: 15011916 NR Desc: nucleolar protein family A
  misc_feature: Homolog of GI Number: 72021419 NR Desc:  similar to nucleolar protein family A
  misc_feature: Homolog of GI Number: 55623056 NR Desc:  similar to nucleolar protein family A
  misc_feature: Homolog of GI Number: 50746777 NR Desc:  similar to nucleolar protein family A
  misc_feature: Homolog of GI Number: 28316950 NR Desc: RE52135p
  misc_feature: Homolog of GI Number: 23489852 NR Desc: snornp protein gar1
MRPPRGRGGGGRFGGGGGRGGGGGRFGGGGRGGRFGGGFRDEGPPAEVVEVSTFVHACEGDAVTKLTNEKVPYFNAPIYLQNKTQVGKVDEIFGPINESYFSVKMMEGIIATSYKEGDKFYIDAMKLLPLSRFLPQPKGQSQGAPRGGGRGGRGGGRGRGGSFRGGRGPPRGGGRGPRGGGRGGFRGRGRF

SEQ ID NO: 9167 - DNA, 650 bp, Zea mays
  misc_feature: Ceres CLONE ID no. 1491139
  misc_feature: Ceres CDNA ID no. 25446155
  CDS (62)..(337): REFERENCED BY SEQ ID NO: 9168
acaacaaaatccccgtcttctgtgactggctggctaggtatagctaggtaaccgtgcgtgcatgagcgagcagggcaagaggccgacgacgacgatgtccggcggcgggtcggcggccgagtcgccggcgagctcgtgcgtgtcgtcggacgcggaggacgaggtacagcaggcggtggcgccgaagccgatggtggtggtggggtgcccgcagtgcctcatgtacgtgatggtgtccggggaggagcagcagcccaagtgcccgcggtgcaagagccccgtgctgctgcacttcctccgcggcggcaacggcaagctgccagccggccggcagtaacgcatcacatatattattagtattagctaattaagctagctagcagctatagctcttgtgtgttttagttaattaattgctgctgcccttttctagtagtcttttcttttttttatgcatgttagcgtcgatggattggatccaagaatgttgttactaccgtagtaggagtactatgtactagcttatagattgcttcttcttcttcttcttccaccgctagctactatagcaaataaagcgcagctgtgaaatgaaatgaaatgaatattaggtggtggtggtgtgttgcttgctaaaaaaaaaaaaaaaa

SEQ ID NO: 9168 - protein, 80 aa, Zea mays
  misc_feature: Ceres CLONE ID no. 1491139
  misc_feature: Ceres CDNA ID no. 25446155
  misc_feature: Homolog of GI Number: 50929771 NR Desc: OSJNBa0088H09.9
  misc_feature: Homolog of GI Number: 34908532 NR Desc: P0423B08.15
  misc_feature: Homolog of GI Number: 50924115 NR Desc: OJ991214_12.5
MSGGGSAAESPASSCVSSDAEDEVQQAVAPKPMVVVGCPQCLMYVMVSGEEQQPKCPRCKSPVLLHFLRGGNGKLPAGRQ

SEQ ID NO: 9169 - DNA, 681 bp, Zea mays
  misc_feature: Ceres CLONE ID no. 1491863
  misc_feature: Ceres CDNA ID no. 25446884
  CDS (1)..(558): REFERENCED BY SEQ ID NO: 9170
aaccttgccatcacctcctcgcctagcctgccactgccagcaggtgccaccgccatctctgctctgctctcgctgcgcgtccggacggggcaggccgccaagaaggctgcgctgtccgtgtccgcgtcgtccacgctggcgggcgccttcctcgcggcgctggcgtcgtcgcccgacgctgcgctggcggacgtggcggcggcggacgccggcggcgacagccgcggccagctgctgctcgtcgtggtggcgcccgccatcgggtgggtgctgtacaacatcctgcagccggcgctgaaccagctgaaccgcatgcgcagcagccaggccgtggccgccggcctgggcctcggcgccgccgccgccgccgggatggcggccccgcccgaagcctccgccgccgtggtgcaggacctcgcggcaatcgccgccgccgcgcccgccgacgacagccgcggcctcctcctgctcatcgtcgtcgcgcccgccatcggctgggtgctcttcaacatcctccagccggcgctcaaccagctcaaccgcatgcggtccgactgaagctagctagctagcgtccgtttccgtatccgcggcgtgcgttgtagacgtgaagcacgtggttggttgatcaacgtacgtggacgtggcctgtctttccatcttcaaaaaaaaaaaaaaaaa

SEQ ID NO: 9170 - protein, 81 aa, Zea mays
  misc_feature: Ceres CLONE ID no. 1491863
  misc_feature: Ceres CDNA ID no. 25446884
  misc_feature (46)..(80): Pfam Name: PsbY PFAM Desc: Photosystem II protein Y
  misc_feature: Homolog of GI Number: 51979541 NR Desc: PREDICTED OJ1005_B05.27 gene product
  misc_feature: Homolog of GI Number: 57282599 NR Desc: PsbY
  misc_feature: Homolog of GI Number: 6093830 NR Desc: Photosystem II core complex proteins psbY
  misc_feature: Homolog of GI Number: 67985765 NR Desc: Pantoate
  misc_feature: Homolog of GI Number: 67987371 NR Desc: Aldehyde dehydrogenase
  misc_feature: Homolog of GI Number: 67984799 NR Desc: Heavy metal transport/detoxification protein:E1
  misc_feature: Homolog of GI Number: 71368536 NR Desc: LigA
  misc_feature: Homolog of GI Number: 66778264 NR Desc: LigA
MRSSQAVAAGLGLGAAAAAGMAAPPEASAAVVQDLAAIAAAAPADDSRGLLLLIVVAPAIGWVLFNILQPALNQLNRMRSD

SEQ ID NO: 9171 - DNA, 521 bp, Zea mays
  misc_feature: Ceres CLONE ID no. 1492027
  misc_feature: Ceres CDNA ID no. 36706886
  CDS (85)..(387): REFERENCED BY SEQ ID NO: 9172
aaagaccaccgacgcgtagcacagtccattattgccgtctcccttttgcgtgagcaaagaaagagagcgagaagagcagtcgccatgtctggcatcatccacaagatcgaggagaagctccacatggggggcgaccacaagaataaggaggaggagcaccacaagaaggccgaggagcaccacaagaaggaggagggggagcaccacaagaaggacggcggggagcacaaggaaggcatcgtggagaagatcaaggacaagatcaccggcgagcacggcgacaagtccggcgaccacaaggaaaagaaggacaagaaaaagaagaagcacggcgagggccacgaccacgacggcggccacagtagcagcagcagcgacagcgactgagatctggtgtcgcagcacaggtgcaacacatgtatgcttgctggatggaggattcataccagctgatgctgatgtagtgtttcactggtgtcatgcatgtatcgtgctattataatcaaaaaaaaaaaaaaaaa

SEQ ID NO: 9172 - protein, 100 aa, Zea mays
  misc_feature: Ceres CLONE ID no. 1492027
  misc_feature: Ceres CDNA ID no. 36706886
  misc_feature (2)..(100): Pfam Name: Dehydrin PFAM Desc: Dehydrin
  misc_feature: Homolog of GI Number: 50582768 NR Desc: putative dehydrin
  misc_feature: Homolog of GI Number: 2913893 NR Desc: LIP5
  misc_feature: Homolog of GI Number: 50812722 NR Desc: dehydrin 13
  misc_feature: Homolog of GI Number: 2331141 NR Desc: water
  misc_feature: Homolog of GI Number: 60459395 NR Desc: cold
  misc_feature: Homolog of GI Number: 7446584 NR Desc: cold stress protein SRC1
  misc_feature: Homolog of GI Number: 18478480 NR Desc: maturation
  misc_feature: Homolog of GI Number: 45790792 NR Desc: water stress induced protein
  misc_feature: Homolog of GI Number: 1657853 NR Desc: cold acclimation protein WCOR825
  misc_feature: Homolog of GI Number: 53748475 NR Desc: cold stress
MSGIIHKIEEKLHMGGDHKNKEEEHHKKAEEHHKKEEGEHHKKDGGEHKEGIVEKIKDKITGEHGDKSGDHKEKKDKKKKKHGEGHDHDGGHSSSSSDSD

SEQ ID NO: 9173 - DNA, 757 bp, Zea mays
  misc_feature: Ceres CLONE ID no. 1492054
  misc_feature: Ceres CDNA ID no. 25446791
  CDS (61)..(501): REFERENCED BY SEQ ID NO: 9174
aactgcaaccccggaacagagcgaggcgacgccgaggcacctcatctccggcgaagggaaatggcgaccgttccaggggatctgatctggcagattgtgaggaagaacaactccttcctggtgaagcagtttggcaacggcaatgccaaggtgcagttcaccaaggagcccaacaacctctacaatttacactcctacaagtactctggcttagcaaacaagaaaactgtaacgatccagccagctgctggaaaggactcggctgtggtcctctctactaccaagaccaagaagcagaacacacccgcgaagctcagccacaagtctgtgatgcgcaaggagttccgcaagatggccaaggctgtgaaaaaccaggttggcgacaactattacaggcctgatctgaccaagtcggcccttggtaggctgagctctgtgtaccgcagcctccaggttgccaagtctggtgtcaagaagaagaacaggcagcctacgcactaagcctgtgttctgtcgttggtgcccatagtctcagcttatatttatccaatgtctccaacagttttgagacttgttagaactagagcaaatcgtgttaagatgttgccgtttgtcattctatagcaagaattccatgacaaagattgcttggcacttgatcgctgctttgtttgcaagctggctggccgggattacccctgatttttgttgggttctggaacatgtatgtctagcttcttaaaaaaaaaaaaaaaaa

SEQ ID NO: 9174 - protein, 146 aa, Zea mays; identical to SEQ ID NO: 4392
  misc_feature: Ceres CLONE ID no. 1492054
  misc_feature: Ceres CDNA ID no. 25446791
  misc_feature: null
  misc_feature: Useful for making plants with altered oil content
  misc_feature (5)..(137): Pfam Name: Ribosomal_L28e PFAM Desc: Ribosomal L28e protein family
  misc_feature: Homolog of GI Number: 50915960 NR Desc: putative 60S ribosomal protein L28
  misc_feature: Homolog of GI Number: 55908881 NR Desc: putative 60S ribosomal L28 protein
  misc_feature: Homolog of GI Number: 34910390 NR Desc: ribosomal protein L28
  misc_feature: Homolog of GI Number: 19310757 NR Desc: putative ribosomal protein L28
  misc_feature: Homolog of GI Number: 55908882 NR Desc: putative 60S ribosomal L28 protein
  misc_feature: Homolog of GI Number: 32411169 NR Desc: predicted protein
  misc_feature: Homolog of GI Number: 66845184 NR Desc: Ribosomal L28e protein family
  misc_feature: Homolog of GI Number: 20976820 NR Desc: GH04183p

SEQ ID NO: 9175 - DNA, 1052 bp, Glycine max
  misc_feature: Ceres CLONE ID no. 1492781
  misc_feature: Ceres CDNA ID no. 35383437
  CDS (58)..(819): REFERENCED BY SEQ ID NO: 9176
agaccaatcactactctcaatacgttttaacctcgaaccaattaattctctccgatcatgccgaccagaaacatcgccatcggcggagtccaagaagaagtgactcaccccagcgcacttagggcggccctcgctgagtttatctcgactttgatcttcgtcttcgccggctcaggctcaggaatcgctttcaacaagctcactgacaatggagccaccactccttcaggccttgtcgccgctgccttagctcatgctttcggtctcttcgtcgctgtttctgtcggtgccaacatctccggtggacacgttaaccctgccgttaccttcggtgccttcctcggtggaaacatcactctcctccgtggtctcctctactggattgctcagcttcttggctcagtcgtcgcttgcttcctccttcagttcgccaccggtggcttggcagttccagcgttcggtctctcggcaggagttggaaccttaaacggtctcgtcttcgagatcgtgatgaccttcgggcttgtctacaccgtctacgccacagccatcgaccccaaaaacggtagcctcggaactatcgcacccatcgccattggtttcatcgtcggagctaacatcctcgctggtggagctttcagcggagcctccatgaacccagccgtcgctttcggaccagccgtcgtgagctggtcatggagtaaccactggatttactgggttggtcctcttgtcggtggtggactcgccggaatcatctacgactttgtttacatcatcgaaaacggtcacgagcaattgcccaccactgattactgaagacgctgaaaattactgttgtaatatgatttgtttttatttcgcatcgtaattgaatttctatgtggccgttggatcttctttttagatgaatccttgtccgttgatgtatgtttgtatttgggtttgttgttggagttgtaattttccttgaaggctttttagacgaatgtgaattatgcatgcttctacgttaaaaaaaaaaaaaaaaaaaaacaaaaaaaaaaaaaaaa

SEQ ID NO: 9176 - protein, 253 aa, Glycine max; identical to SEQ ID NO: 7902
  misc_feature: Ceres CLONE ID no. 1492781
  misc_feature: Ceres CDNA ID no. 35383437
  misc_feature (14)..(235): Pfam Name: MIP PFAM Desc: Major intrinsic protein
  misc_feature: Homolog of GI Number: 5081419 NR Desc: tonoplast intrinsic protein
  misc_feature: Homolog of GI Number: 1514977 NR Desc: VM23
  misc_feature: Homolog of GI Number: 9293929 NR Desc: salt
  misc_feature: Homolog of GI Number: 3688799 NR Desc: gamma tonoplast intrinsic protein 2
  misc_feature: Homolog of GI Number: 21593151 NR Desc: putative aquaporin
  misc_feature: Homolog of GI Number: 22858917 NR Desc: tonoplast intrinsic protein bobTIP26
  misc_feature: Homolog of GI Number: 475048 NR Desc: tonoplast intrinsic protein gamma
  misc_feature: Homolog of GI Number: 16323492 NR Desc: putative aquaporin
  misc_feature: Homolog of GI Number: 21284370 NR Desc: tonoplast intrinsic protein bobTIP26
  misc_feature: Homolog of GI Number: 16492 NR Desc: possible membrane channel protein
  misc_feature: Useful for making plants with increased biomass and foliage
  misc_feature: Useful for making plants with increased biomass and foliage

SEQ ID NO: 9177 - DNA, 508 bp, Zea mays; identical to SEQ ID NO: 8367
  misc_feature: Ceres CLONE ID no. 1493735
  misc_feature: Ceres CDNA ID no. 36706887
  CDS (78)..(353): REFERENCED BY SEQ ID NO: 9178

SEQ ID NO: 9178 - protein, 91 aa, Zea mays; identical to SEQ ID NO: 5620
  misc_feature: Ceres CLONE ID no. 1493735
  misc_feature: Ceres CDNA ID no. 36706887

SEQ ID NO: 9179 - DNA, 661 bp, Zea mays
  misc_feature: Ceres CLONE ID no. 1493788
  misc_feature: Ceres CDNA ID no. 25445558
  CDS (3)..(395): REFERENCED BY SEQ ID NO: 9180
atatgcctcaggccctcagcacaaggcccgtgttcgtgtcctcaccctcggccgaacagttccccaagtccccgactgctctctgtctctctattggcgacgactgggctaccgccgccacaggcgccctacgccaggtgtccaggtctcgggcccttctccggcaccgagcacccaccagcggaatataccatggaggtcaggcccatggtagctctgcgtgccgccctagttggtggggtagcggcatttgcgaagatcggtggggcgatgaaagccgcaggcggtgtcaagattggtgcagccgctgcagccgtcacggctgcaacatcagctgccatatcgggaaaagacgcaaaagaagacacttcaaagccggaaacgaaatgatatgacccatggattggtcgacaagtatgaaatcgcctctccagaggtttagaagagagagggtgccatagtcaataagttacaggagtaaattttgatgctccgtgtgttttttatctcgggaataagaatgacagtacagttttccccagaagtatgattttgtgttgtgcaacagtttcggctgttgaatgcttttagtcacactgtctgaatggcttgatttctgctgtgccacattctggggcgcgatgtaaaaaaaaaaaaaaaa

SEQ ID NO: 9180 - protein, 65 aa, Zea mays
  misc_feature: Ceres CLONE ID no. 1493788
  misc_feature: Ceres CDNA ID no. 25445558
MEVRPMVALRAALVGGVAAFAKIGGAMKAAGGVKIGAAAAAVTAATSAAISGKDAKEDTSKPETK

SEQ ID NO: 9181 - DNA, 817 bp, Zea mays
  misc_feature: Ceres CLONE ID no. 1493959
  misc_feature: Ceres CDNA ID no. 25401538
  CDS (95)..(655): REFERENCED BY SEQ ID NO: 9182
acgccaagggccgcagcggcaggccacgcatctctctcccttccttctccccgttctccgtgcaatctcggccgtttccgctcccgccatcgccatggaggaggccaaggttgtggagtccaaggacgggacgatctcagttgcttcagcatttgctggtcatcaggaagctgtgcaagacagggaccacaaatttttatcaaaggcagtggaggaagcataccgaggagttgactgcggcgatggaggaccatttggtgcagttgttgtccataatgatgaagtaatagttagctgccataacatggttttgaagaacactgatccaactgcgcatgctgaagtaactgcgataagagaggcttgcaaaaagcttgggaaaattgagctgtcggattgtgaaatttatgcatcttgtgagccatgcccaatgtgttttggtgctgttcatctatcccggattaagaggctggtgtatggagccaaggcagaagctgcaattgccattggatttgatgatttcattgctgatgctctcagaggaactgggtactatcagaaggccaacatggagataaagcaggcagatggaaatggagccatgattgctgaacaagtatttgagaagactaaagcgaagttccaaatgtattgaaccgtggaattacttggtgggatgatttaacattgtgatagccctctgattctcaaaaaagaataacacaacctctggtattatgtaatttgtgacgggccacaaattgtcattgtgcttccatttatgaaaacaagattgatgccaaaaaaaaaaaaaaaa

SEQ ID NO: 9182 - protein, 186 aa, Zea mays
  misc_feature: Ceres CLONE ID no. 1493959
  misc_feature: Ceres CDNA ID no. 25401538
  misc_feature (29)..(130): Pfam Name: dCMP_cyt_deam PFAM Desc: Cytidine and deoxycytidylate deaminase zinc
  misc_feature: Homolog of GI Number: 50919917 NR Desc: putative deoxycytidine deaminase
  misc_feature: Homolog of GI Number: 23928436 NR Desc: putative cytidine deaminase
  misc_feature: Homolog of GI Number: 3204108 NR Desc: putative cytidine deaminase
  misc_feature: Homolog of GI Number: 22137296 NR Desc: AT5g28050/F15F15_120
  misc_feature: Homolog of GI Number: 18266045 NR Desc: deoxycytidine deaminase
  misc_feature: Homolog of GI Number: 79328917 NR Desc: hydrolase/ zinc ion binding
  misc_feature: Homolog of GI Number: 48858644 NR Desc: COG0590: Cytosine/adenosine deaminases
  misc_feature: Homolog of GI Number: 67915989 NR Desc: Guanine deaminase
  misc_feature: Homolog of GI Number: 71150587 NR Desc: Guanine deaminase
  misc_feature: Useful for increasing seed/fruit yield or modifying fruit content
  misc_feature: Useful for making plants with altered leaf shape eg curled leaves
  misc_feature: Useful for making plants with altered leaf shape eg curled leaves
  misc_feature: Useful for making plants with increased biomass
  misc_feature: Useful for making plants with increased biomass and foliage
  misc_feature: Useful for making plants with increased biomass and foliage
  misc_feature: Useful for making plants with increased biomass and foliage
  misc_feature: Useful for making smaller plants
  misc_feature: Useful for modifying plant architecture
  misc_feature: Useful for sterility
MEEAKVVESKDGTISVASAFAGHQEAVQDRDHKFLSKAVEEAYRGVDCGDGGPFGAVVVHNDEVIVSCHNMVLKNTDPTAHAEVTAIREACKKLGKIELSDCEIYASCEPCPMCFGAVHLSRIKRLVYGAKAEAAIAIGFDDFIADALRGTGYYQKANMEIKQADGNGAMIAEQVFEKTKAKFQMY

SEQ ID NO: 9183 - DNA, 787 bp, Zea mays
  misc_feature: Ceres CLONE ID no. 1494107
  misc_feature: Ceres CDNA ID no. 25401387
  CDS (42)..(494): REFERENCED BY SEQ ID NO: 9184
ctgctcagtactcgcctgcccgctttccctcgcccccggcgatgggtcgcacgaagcacgcggtggcggcgacgacggagacgaagaagcggctccgcttcgagctatccccgcgatggaggccgccgccgccgatgcgccaggtaccgccggagccgcagccgcagccggagaagaagaagaagcgggcgtaccggttccggccgggcacggtggcgctgcgggagatcaggaagtaccagaagtccaccgagccgctcatccccttcgcgcccttcgtccgcctggttaaggagatcaccaacgacctcacgaagggagagctgaaccactggactcctcaggcgctcatctcgttgcaagaggctgcagagtatcacatagtcgatgtatttgaagaggcaaatctatgtgccatccatgctaagcgtgttaccatcatgcaaaaggacatacagcttgcgaggcgtatcggggggagatggctttggtgatactaatggaagacgttttctgcatcatagggagcaaagactggtgatttggtggtactaatggtagatgttctgtgtatgaggggtgcaatgcaaaggcgctgatggtaatggcccagtatgtttgtgagtgtatcgttaggaagtaatgcaggtgtattttcatttagttagcatgtcttcgaagttgatctggttcattgcatggttgggatcatctgacctctctgctttgctccatttgaattgatctaattcagacagcgtttctgcgaagaaaaaaaaaaaaaaaa

SEQ ID NO: 9184 - protein, 150 aa, Zea mays
  misc_feature: Ceres CLONE ID no. 1494107
  misc_feature: Ceres CDNA ID no. 25401387
  misc_feature (69)..(147): Pfam Name: Histone PFAM Desc: Core histone H2A/H2B/H3/H4
  misc_feature: Homolog of GI Number: 21668094 NR Desc: centromeric histone h3
  misc_feature: Homolog of GI Number: 50511368 NR Desc: histone H3
  misc_feature: Homolog of GI Number: 19338704 NR Desc: centromeric histone H3 HTR12
  misc_feature: Homolog of GI Number: 19338706 NR Desc: centromeric histone H3 HTR12
  misc_feature: Homolog of GI Number: 33146140 NR Desc: histone H3 like protein
  misc_feature: Homolog of GI Number: 21592479 NR Desc: histone
  misc_feature: Homolog of GI Number: 33146142 NR Desc: histone H3 like protein
  misc_feature: Homolog of GI Number: 51103319 NR Desc: centromeric histone
  misc_feature: Homolog of GI Number: 51103313 NR Desc: centromeric histone
  misc_feature: Homolog of GI Number: 33146138 NR Desc: histone H3 like protein
MGRTKHAVAATTETKKRLRFELSPRWRPPPPMRQVPPEPQPQPEKKKKRAYRFRPGTVALREIRKYQKSTEPLIPFAPFVRLVKEITNDLTKGELNHWTPQALISLQEAAEYHIVDVFEEANLCAIHAKRVTIMQKDIQLARRIGGRWLW

SEQ ID NO: 9185 - DNA, 1483 bp, Zea mays
  misc_feature: Ceres CLONE ID no. 1494126
  misc_feature: Ceres CDNA ID no. 40351999
  CDS (119)..(1234): REFERENCED BY SEQ ID NO: 9186
cttttcggtcttggaatccttcctccctccctccctcctttccgggtcgcccgcgctccgcctcccggatcgcaattccgcatcgccccgccgcagccccagccccagccagccaccgatggcgcggcgatccgccccgctcctccgccgcctggtctcctccgcgccgcccctcccgggccacggcggcggggcgcgccgcacggtgacctacatgccccgcccgggcgacggcaccccgcgccccgtcacgctcatcccgggcgacggcatcgggcccctcgtcaccggcgccgtcgagcaggtcatggaggcgatgcacgcgcccgtctacttcgagtcctacgacgtccacggcgacatgcccgccgtgccccccgcggtcatcgagtccatccgccgcaacaaggtctgcctcaagggcggcctcgccacccccgtcggcgggggcgtctcctccctcaacatgcagctccgcaaggagctcgacctcttcgcatcgctcgtcaactgcgccaacgtccccggcctgcccaccaggcaccagaacgtcgacatcgtcgtcatcagggagaacaccgagggcgagtactcgggcctagagcacgaggtcgtcccgggggtcgtcgagagcctcaaggtcatcacgaagttttgctctgagaggattgccaaatatgccttcgagtatgcttaccttaactaccggaagaaagtcacagcagtgcataaagcaaacatcatgaaacttgctgatggtttgttcttggagtcttgccgtgagattgccgctaaatatccaagtattgagtataatgaaatcattgttgacaactgctgcatgcaacttgtttcaaggcctgagcagtttgatgttatggttacacctaacctttacggcaatttggttgccaacacagctgcaggtcttgttggaggaacaggtgtcatgccaggaggtaatgtgggtcaggatcatgccatcttcgagcaaggtgcttctgcaggaaatgtgggaaatgacaatcttgtagagcagcagaaagcaaaccctgtcgccctgctcctgtcgtccgcgatgatgttgaggcatttgcagttcccgtcgttcgctgaccgtctggaaactgcggtgaagcgggtcattgcagacggcaagtacagaacaaaggatctgggcggcaccagcaccacccaggaagttactgatgcagtgatcgctaatctggattagatacctgatgcacgcctgcagaatcgattcttttggaggactggtttacaggtcccaacttttgagtgctattttttccgtacagcgttagatcggcaattatatatttcagaaataattgagaaacccacgaggattattcttcccacgatactttgtagcaaggcaaaacaccttgtgttgcagaggggatagctgtctaccttaaatttaaacggcatgcattgaaagttaaaaaaaaaaaaaaaa

SEQ ID NO: 9186 - protein, 339 aa, Zea mays
  misc_feature: Ceres CLONE ID no. 1494126
  misc_feature: Ceres CDNA ID no. 40351999
  misc_feature (11)..(334): Pfam Name: Iso_dh PFAM Desc: Isocitrate/isopropylmalate dehydrogenase
MPRPGDGTPRPVTLIPGDGIGPLVTGAVEQVMEAMHAPVYFESYDVHGDMPAVPPAVIESIRRNKVCLKGGLATPVGGGVSSLNMQLRKELDLFASLVNCANVPGLPTRHQNVDIVVIRENTEGEYSGLEHEVVPGVVESLKVITKFCSERIAKYAFEYAYLNYRKKVTAVHKANIMKLADGLFLESCREIAAKYPSIEYNEIIVDNCCMQLVSRPEQFDVMVTPNLYGNLVANTAAGLVGGTGVMPGGNVGQDHAIFEQGASAGNVGNDNLVEQQKANPVALLLSSAMMLRHLQFPSFADRLETAVKRVIADGKYRTKDLGGTSTTQEVTDAVIANLD

SEQ ID NO: 9187 - DNA, 697 bp, Zea mays
  misc_feature: Ceres CLONE ID no. 1494378
  misc_feature: Ceres CDNA ID no. 25445796
  CDS (82)..(393): REFERENCED BY SEQ ID NO: 9188
aaactagccctaagtgtttgttagaggtacgccgattcgaaccatccagtctccgtgtccagtcgagtctcagcaaggaagatgtgggggaaaggaaagaagcgtttcggcggtggcggcagcggtgagcccgcggccaagcgccaggccgcgagggacgatggcccctccgaatccgctgaagacggtaccgtcgtagccgagatatcgaagaacaagaaggtgtccgttaggagctggaaaggcagggtcttcgtcgacttacgcgagttctacttcaaggacggcaagactctccccacccgcaaaggtatatcactccaattagatcagtggaagatactgaaggacaacatcaaagccataaatgaggcaatcgaggaaaatacatgatgggagccgccaagcagtcacgtgacgggcgagcttttgcttcttctctgtttgaggcctgatgtacggaagtagtttttgttgcccatatgctgccgtgttgcttttgtccatttgaccacctgctgttgtaggtggccgcatggccgaaaggtttggtttctgccccgtgctactagtaaacttaaacgtcggacggatgacgtaacttctcactattatcttgtagccaaaaacagcttgttaggattgcagaactaagatttagtgtaaaaatgatccggtttcaaaaaaaaaaaaaaaa

SEQ ID NO: 9188 - protein, 103 aa, Zea mays
  misc_feature: Ceres CLONE ID no. 1494378
  misc_feature: Ceres CDNA ID no. 25445796
  misc_feature (12)..(99): Pfam Name: PC4 PFAM Desc: Transcriptional Coactivator p15
  misc_feature: Homolog of GI Number: 50909391 NR Desc: transcriptional coactivator p15
  misc_feature: Homolog of GI Number: 28466805 NR Desc: At5g09250
  misc_feature: Homolog of GI Number: 34910378 NR Desc: P0684B02.23
  misc_feature: Homolog of GI Number: 13699910 NR Desc: putative transcriptional coactivator
  misc_feature: Homolog of GI Number: 51465798 NR Desc: general transcriptional coactivator
  misc_feature: Homolog of GI Number: 2498735 NR Desc: Activated RNA polymerase II transcriptional coactivator p15
  misc_feature: Homolog of GI Number: 17137156 NR Desc: CG8396
  misc_feature: Homolog of GI Number: 6755364 NR Desc: RNA polymerase II transcriptional coactivator
  misc_feature: Homolog of GI Number: 34869544 NR Desc: similar to DNA
MWGKGKKRFGGGGSGEPAAKRQAARDDGPSESAEDGTVVAEISKNKKVSVRSWKGRVFVDLREFYFKDGKTLPTRKGISLQLDQWKILKDNIKAINEAIEENT

SEQ ID NO: 9189 - DNA, 687 bp, Zea mays
  misc_feature: Ceres CLONE ID no. 1494431
  misc_feature: Ceres CDNA ID no. 25446156
  CDS (135)..(542): REFERENCED BY SEQ ID NO: 9190
atcgagaaggaatccacccttgactccaacagccaacagcagataaggaaacgcacgcgccgcgacgcaactatcaagccattcgtccctgtggaagtttccacactcccttcccttcccttgtacccactccaatggcgccctccctcctggccgccgtctccgcctcgcccttcctcctacccggcagcagcggcatcagccgcaggccactgggcgctgccccaacccgccgggccggactgcgcgtggccgcgcttaagtacgaccctgctaaggtggcaccgcagaacgaccgggtgctcgtccgtcttcagcagatccctgagaaatctgctggtggtgtattgctaccgaaatctgctgttaagtttgagaggtatctgatgggtgagattctatcggttggtgctgatgttagtgaagttgaggctgggaagaaggttctcttctcagacatcaatgcttacgaggtggaccttgatacggatgagaagcactgcttctgccgggagtcagatttgttagctgtagttgaatgaattttaccatgaaaattacagacttacttgcccatgctccaactgcatggacttatcttgcacctactttgttgtacttgaactcggcttctagatgagtgttagttatcattgtattttggccgcaataaaaaaaaaaaaaaaa

SEQ ID NO: 9190 - protein, 135 aa, Zea mays
  misc_feature: Ceres CLONE ID no. 1494431
  misc_feature: Ceres CDNA ID no. 25446156
  misc_feature (48)..(134): Pfam Name: Cpn10 PFAM Desc: Chaperonin 10 Kd subunit
  misc_feature: Homolog of GI Number: 37536956 NR Desc: putative chloroplast chaperonin
  misc_feature: Homolog of GI Number: 33863717 NR Desc: GroES protein
  misc_feature: Homolog of GI Number: 97572 NR Desc: groES protein (strain PCC 7942)i|116205|sp|P22880|CH10_SYNP7 10 kDa chaperonin (Protein Cpn10)groES protein)
  misc_feature: Homolog of GI Number: 72382807 NR Desc: Co
  misc_feature: Homolog of GI Number: 53765172 NR Desc: COG0234: Co
  misc_feature: Homolog of GI Number: 33241039 NR Desc: Co
  misc_feature: Homolog of GI Number: 17231153 NR Desc: chaperonin GroES
MAPSLLAAVSASPFLLPGSSGISRRPLGAAPTRRAGLRVAALKYDPAKVAPQNDRVLVRLQQIPEKSAGGVLLPKSAVKFERYLMGEILSVGADVSEVEAGKKVLFSDINAYEVDLDTDEKHCFCRESDLLAVVE

SEQ ID NO: 9191 - DNA, 1227 bp, Zea mays
  misc_feature: Ceres CLONE ID no. 1494450
  misc_feature: Ceres CDNA ID no. 35383438
  CDS (102)..(1058): REFERENCED BY SEQ ID NO: 9192
atcattcatccatccccgagtgtctctcagctcgtcggctcgtcataggctcatcactagtggataggcgccttggtcgagtcgggtgaggggcaggcaggatgcaggacctgttctcggtgccctcctgcttctcgtcgggcgagaagcagctgccggacgcgccggcgtcggcggcgccggcgaccaggtcggggcagagcgcggtgacgctggtgtaccgcgcggtgatctccgggcagagccggctggtcaccgtcacgtggtgcaggaacctgctggcccacggcatgcaggtgtccatcgaggggtcggccggcggcggcaaggacaagagcggcggcggcagggagcacggcagcggcggcggcatcgagggcggcgccaataagagctgcagcgcgtgcaaggtggagatgcagccgtggcacttctggcgcaagtacggggccaagcagttccaggtggacggccgggcggtggacgtggtgtgggacctgcgggcggcgcggttctccgacgagccggagccggtgtcggactactacgtggcggtggtctccggcgaggaggtggtgctcctgctcggcaaccagaacaaggaggcgttccggcggacgggggcccggccgtcgctgtcgctgggggacgcggccatggtgtgcaagaaggaacacgtgttcagcaagaagcggttcctgacccgggcgaggttccacgagaaggggaagctgcacgacatcagcatcgagtgcagcagcggcaacctcggcagcggcggcggcggcacggacgtggacatggccatcaagatcgacggctgcgtcaacgtgctcgtcaagcacctccagtggaagttcaggggcaacgactgcatctccatcaacaagatgaaggtgcaggtctactgggacgcccacgactggctcttcggcaccggcatgcgccaggccctcttcatcttcaagccccagcccccctcgcccgactccgacgccgccctcgccgacgagttctccgatttctgcctcttcctctacgcatggaagatcgaatgagctagacttagctagctagacaccctgcctacattcgtttgttactgccgccacattacagagcggctgatgatggacatttcaccatgttacgagcaacatacttctaccatgtaatgtaagtatgtaacgatgtgtgagtgtaagagggggaaaaaaaaaaaaaaaa

SEQ ID NO: 9192 - protein, 318 aa, Zea mays
  misc_feature: Ceres CLONE ID no. 1494450
  misc_feature: Ceres CDNA ID no. 35383438
  misc_feature: Homolog of GI Number: 50902328 NR Desc: P0456E05.14
  misc_feature: Homolog of GI Number: 55243135 NR Desc: ENSANGP00000001657
  misc_feature: Homolog of GI Number: 58583125 NR Desc: putative vgr
  misc_feature: Homolog of GI Number: 72547023 NR Desc: proteophosphoglycan ppg4
  misc_feature: Homolog of GI Number: 72547041 NR Desc: proteophosphoglycan ppg1
  misc_feature: Homolog of GI Number: 11359723 NR Desc: proteophosphoglycan
  misc_feature: Homolog of GI Number: 72547036 NR Desc: proteophosphoglycan 5
  misc_feature: Homolog of GI Number: 72547018 NR Desc: proteophosphoglycan ppg3
MQDLFSVPSCFSSGEKQLPDAPASAAPATRSGQSAVTLVYRAVISGQSRLVTVTWCRNLLAHGMQVSIEGSAGGGKDKSGGGREHGSGGGIEGGANKSCSACKVEMQPWHFWRKYGAKQFQVDGRAVDVVWDLRAARFSDEPEPVSDYYVAVVSGEEVVLLLGNQNKEAFRRTGARPSLSLGDAAMVCKKEHVFSKKRFLTRARFHEKGKLHDISIECSSGNLGSGGGGTDVDMAIKIDGCVNVLVKHLQWKFRGNDCISINKMKVQVYWDAHDWLFGTGMRQALFIFKPQPPSPDSDAALADEFSDFCLFLYAWKIE

SEQ ID NO: 9193 - DNA, 839 bp, Zea mays
  misc_feature: Ceres CLONE ID no. 1494471
  misc_feature: Ceres CDNA ID no. 25445972
  CDS (273)..(569): REFERENCED BY SEQ ID NO: 9194
attatcaatttatcaccggggttagttttatgattcccaaacgaatgtatgcgcccaagctaggaaagggaggtggaaccttgggcttggggatggaggggagggagaaggcgagggaggcgatgggggcagcgacgacggtgaggaggagggagccggcgaagaggcccgggagagtgtcgagccccagggagatggcgccctcgtcccgcagcggcagcaccacgaagtaggcgctcaggatctgcacctccagcacaaacataattcagatggcgtatcgtaaccttgcaggaacgggacgggaggactacggcgagatggatcaaaggttggcttacgaagaagaaggtggcggccgcgctcatcaacggggggatctcgtgggggcggactgccacgagagtagccaccgccgcctcggcgcgctcccggatgagccggcgaggcgtcgccattcccccgctcctctcctgacggcttgggttgactctactcttccgcatccgcagtcctatgcctcctgcatcggccagccatgtgatgtgcctggaagagtcattgtttaggcgagatccagcgaatcccgtgcccaccttgagcaaaattcattctctggtcaaagtgcaagtgcatgatcaggacatcattttaggagcaatgctttcgttgatcgaagcaaccactgaacgaaatgagtcgtgttgctttgatgcaatggaagtttctcttgtttctgaaaaaaaaaacattaccctttcgtgctctgaaaccttaaaattttgctgcaaataaaataccgcagcatctgcggtttctagtcaaaaaaaaaaaaaaaa

SEQ ID NO: 9194 - protein, 98 aa, Zea mays
  misc_feature: Ceres CLONE ID no. 1494471
  misc_feature: Ceres CDNA ID no. 25445972
MAYRNLAGTGREDYGEMDQRLAYEEEGGGRAHQRGDLVGADCHESSHRRLGALPDEPARRRHSPAPLLTAWVDSTLPHPQSYASCIGQPCDVPGRVIV

SEQ ID NO: 9195 - DNA, 929 bp, Zea mays
  misc_feature: Ceres CLONE ID no. 1494685
  misc_feature: Ceres CDNA ID no. 36593867
  CDS (2)..(241): REFERENCED BY SEQ ID NO: 9196
tcctccgcctccgtcgcctattcgcctctcccactctctgcccccgcctcccctccttctctccctcccccgcatgcctcaactgctcctctccggcgtcgtagccgtccctctcgctcccgtgacatccagatctgacttgggggcgcagctcagagtgccaatgcgccgcaacctccgttgcgcccgcacgtgccctagccagtcgccatggagctcatccccatcaagcccgaggtaggatctctcgtcgagattggataggagctccgaacgcgagccatagacggggagttgatgccaccgggcaatggatggtcgcatcctcaggacctccgcgtgcaacagcagcggctatcatttttctcatcgcctacttcaatagcctacagcattagcagtaccgtgctttttacttcacaagaaaaggttggccgaggtccctgctctagcgcaaggatttctactgcaacgattgcaacacacacaggaacttttttgaaaccttcaagcttcaacgcttgaccctttgcattggtggcatagtgaatattgaactactggagagaatacaaaaacaatttacggatgataggtactacatatggcagatgaggcaactggccatggcatatatgttgcttcgacctgtgcagtttatggatgaagacgaagctgacctgcagatgtaaactttgttttctatggaccaggtcttgtatatccaaattgaacggattgttctaataaatatatcacaaaaagataaagtataatatttgttcttgtgcgttgttgcaatgaattttagtgaggtaatacgaacttatatccatttttcaaatatattctaggttctaaccaactggtccaaaatgtcacattgattgatatgtggatttttatacttcagaaaaaaaaaaaaaaaa

SEQ ID NO: 9196 - protein, 75 aa, Zea mays
  misc_feature: Ceres CLONE ID no. 1494685
  misc_feature: Ceres CDNA ID no. 36593867
MPPGNGWSHPQDLRVQQQRLSFFSSPTSIAYSISSTVLFTSQEKVGRGPCSSARISTATIATHTGTFLKPSSFNA

SEQ ID NO: 9197 - DNA, 807 bp, Zea mays
  misc_feature: Ceres CLONE ID no. 1494696
  misc_feature: Ceres CDNA ID no. 40352000
  CDS (116)..(574): REFERENCED BY SEQ ID NO: 9198
tcgcccaggccgacctaaagccgtccattccgtcgtctccatgctctaggacaacgagcacgcggagcccacgtctccacccccaccgccggccgcatctcagagaatttcgaggatgtcgactccttcaaggaagaggctgatgagggacttcaagcggctgatgcaggaccctcctgcgggcataagcggggcgccgcaggacaacaacataatgctgtggaatgctgtgatttttggccctgacgatagcccgtgggatggaggcacgtttaagctgactctccagtttaatgaagaatatcctaataagccaccaacagttcggtttatttctcggatgtttcaccctaacatttatgctgatggaagcatatgcttagatattctacagaatcagtggagcccaatatatgatgtagctgctatacttacatctatccagtcgctgctgtgtgatcctaacccaaattcgcctgctaactcagaagctgcccgcatgttcagtgagaacaagcgagagtacaaccgcaaagtgcgggagattgttgagcagagctggacggcagactaataagttgagctcaccatgtgttatcatgcggtttctgtaccaaaatgtttgtaactaaaatgactgaactctgtcgttaccacctgaaacagcaacttgctttgttgcatcgtttggctggacggttggagattgctctgtcatggcctgtgtctacactgtctgtatctggaacgcaaacattttgtaacgtcttgtgtgagttaaaaaaaaaaataaaaaaaaaaaaaaaa

SEQ ID NO: 9198 - protein, 152 aa, Zea mays; identical to SEQ ID NO: 2818
  misc_feature: Ceres CLONE ID no. 1494696
  misc_feature: Ceres CDNA ID no. 40352000
  misc_feature (8)..(145): Pfam Name: UQ_con PFAM Desc: Ubiquitin

SEQ ID NO: 9199 - DNA, 547 bp, Zea mays
  misc_feature: Ceres CLONE ID no. 1494701
  misc_feature: Ceres CDNA ID no. 36706888
  CDS (105)..(380): REFERENCED BY SEQ ID NO: 9200
gtggagcttctcttaatctcttgtaaaaaaaaaaaccttgacaagaacgaattcgcctccggctctcctcttctcgagcgttttcggcaccacggcgcagtaggatggcggcggcggccccgacgagagcagaggtgctgtcgctcttccgttccttactccgcacggcgaagaagttctcggactacaacatccgcgagtacacgcgccgacgcgccgcggactccttccgcgaaaaccgcgccctcgccgatgcgtcggccgccgccgcggcgttctcggaggggaagaagcagctagaggttgcgaagcggcaagcggtggtttactctctctacgcccccaaggccaagagcgtgatggagttgaaggtgcagtgatggctgcgaccttttcttccccaccgttcccgttccagattcgttgcttttgtgtgatgatgaaactataaactgctccgttgtcgcattttctggatgattgtcatgatatagtttcgttctgtgcaataaattactaaattctaccgctaaaaaaaaaaaaaaaa

SEQ ID NO: 9200 - protein, 91 aa, Zea mays
  misc_feature: Ceres CLONE ID no. 1494701
  misc_feature: Ceres CDNA ID no. 36706888
  misc_feature (6)..(70): Pfam Name: Complex1_LYR PFAM Desc: Complex 1 protein
  misc_feature: Homolog of GI Number: 31431993 NR Desc: putative CGI
  misc_feature: Homolog of GI Number: 50734067 NR Desc:  similar to chromosome 6 open reading frame 149
  misc_feature: Homolog of GI Number: 62663447 NR Desc:  similar to CDNA sequence BC034664
  misc_feature: Homolog of GI Number: 51593329 NR Desc: CDNA sequence BC034664
  misc_feature: Homolog of GI Number: 38570054 NR Desc: chromosome 6 open reading frame 149
  misc_feature: Homolog of GI Number: 55625814 NR Desc:  similar to Chromosome 6 open reading frame 149
  misc_feature: Homolog of GI Number: 24639281 NR Desc: CG3717
MAAAAPTRAEVLSLFRSLLRTAKKFSDYNIREYTRRRAADSFRENRALADASAAAAAFSEGKKQLEVAKRQAVVYSLYAPKAKSVMELKVQ

SEQ ID NO: 9201 - DNA, 617 bp, Zea mays
  misc_feature: Ceres CLONE ID no. 1494768
  misc_feature: Ceres CDNA ID no. 25401539
  CDS (83)..(472): REFERENCED BY SEQ ID NO: 9202
ctaaccctagccgcctgcgcgccgccacacgaacccccacccaacccgagcgagcgccggccgaggaggaagagaaggtgagatggctcgcggcgcggcggcggcggcagcggccgcgaagggcaagaagaaggggtccgtctccttcgtgatcgactgcaccaagcccgtggaggacaagatcatggagatcgcgtcgctggagaagttcctccaggagcgcatcaaggtcgccggcggcaaggccgggaacctcggcgactccgtcaccgtcacgcgcgacaagagcaaggtcaccgtcacctcggacggcgccttctccaagaggtacctcaagtacttgaccaagaagtacttgaagaagcacaacgtgcgggactggcttcgtgtgatcgcagccaacaaggagcgcaacgtgtacgagctccggtacttcaacatcgctgagaatgagggcgaggaggaggattagagtgcattgttatattgtagtgcttgttgagttttgatacttgatctgagtacctcctagttatccacctatcttatgttgtgccccgttgaacctggatggtttaatttgaagaatccttatatttataaaaaaaaaaaaaaaa

SEQ ID NO: 9202 - protein, 129 aa, Zea mays; identical to SEQ ID NO: 3844
  misc_feature: Ceres CLONE ID no. 1494768
  misc_feature: Ceres CDNA ID no. 25401539
  misc_feature (13)..(129): Pfam Name: Ribosomal_L22e PFAM Desc: Ribosomal L22e protein family
  misc_feature: Homolog of GI Number: 50939919 NR Desc: putative 60S ribosomal protein L22
  misc_feature: Homolog of GI Number: 42733478 NR Desc: BRI1
  misc_feature: Homolog of GI Number: 6714454 NR Desc: putative 60S ribosomal protein  L22
  misc_feature: Homolog of GI Number: 12642842 NR Desc: putative 60S ribosomal protein L22
  misc_feature: Homolog of GI Number: 6056419 NR Desc: 60S ribosomal protein  L22
  misc_feature: Homolog of GI Number: 57086899 NR Desc:  similar to ribosomal protein L22
  misc_feature: Homolog of GI Number: 33150766 NR Desc: heparin
  misc_feature: Homolog of GI Number: 13592059 NR Desc: ribosomal protein L22
  misc_feature: Homolog of GI Number: 73956651 NR Desc:  similar to 60S ribosomal protein L22
  misc_feature: Homolog of GI Number: 45383834 NR Desc: ribosomal protein L22

SEQ ID NO: 9203 - DNA, 553 bp, Zea mays
  misc_feature: Ceres CLONE ID no. 1495633
  misc_feature: Ceres CDNA ID no. 25445905
  CDS (159)..(362): REFERENCED BY SEQ ID NO: 9204
atttttcggttgcgtcaggtcagcctccctctccggatcccccatctgctccgccgccggccaacgcatcgctccccttggcagccagaatattggttgaagaaggcttgtctctcattatggtagtaggctgtaagttcattatcttttgatgcaggatgacagaagcaccatttctgccacgtgagaggctcttcaagctgcaacatcatttccagaacatgaccaagcacacctacctgaaagggcgctacgatgtgatcacctccgttgccatccctcttgcacttgctgcctccagcatgttcatgattgggcgtggagtttacaacatgtctcatggaattgggaaaaaggagtgatctaccacgggttaactagtttttctacttggcatggaagtaccatccagactatgaagtcttctttgcttgctaaataatactgtcaaagaacaagtcgactacatttttgcatcatatttctgtttgtatttgtggatatgaaatgccatcaacttgaagatcagcattgtcaaaaaaaaaaaaaaaaa

SEQ ID NO: 9204 - protein, 67 aa, Zea mays
  misc_feature: Ceres CLONE ID no. 1495633
  misc_feature: Ceres CDNA ID no. 25445905
  misc_feature: Homolog of GI Number: 47606405 NR Desc: putative COX VIIa
  misc_feature: Homolog of GI Number: 47606407 NR Desc: putative COX VIIa
MTEAPFLPRERLFKLQHHFQNMTKHTYLKGRYDVITSVAIPLALAASSMFMIGRGVYNMSHGIGKKE

SEQ ID NO: 9205 - DNA, 674 bp, Zea mays
  misc_feature: Ceres CLONE ID no. 1495668
  misc_feature: Ceres CDNA ID no. 25447015
  CDS (103)..(420): REFERENCED BY SEQ ID NO: 9206
agtaccgagcgtccgagccacgactcttccctcgctcgctcgttcgtctcctcccaccaaggcaccaaaccaatctagccaccaaggcaccaaccaagagccatggcatccccgttctgcgccgctgccgccgcttgccgcctcgccgtccccgccccgtcccctcccgccgcacgggcgcctaggccccgacgcggcctggtggcggtgcgcgcggaggcgggcggtgggataaacccggccatccggaaggaggaggacaaggtggtcgacaccgttctcaccggcgagctcgccaagccgctcaccgcgtactgtcggtgttggagatcaggaacattcccactgtgcgatggatcccatgtgaagcacaacaaagcaaccggtgataatgtgggccccctgctcgttaagaagtagatgcagtttctttcgacttttgccctagcgtcatgttgagcgctgagctgaacactatctgtatgtcatgatatatgtttttttagccaagataaactatcatgacgcaacgatccttcattcggaataaagtaagctgctcatgtcaacaagtctcagtttcatgattgtaggaaacgttagtgactggtgatacatgtagtgggatgtatgaaaatcggaaaaatattttgttcagaaaaaaaaaaaaaaaa

SEQ ID NO: 9206 - protein, 105 aa, Zea mays
  misc_feature: Ceres CLONE ID no. 1495668
  misc_feature: Ceres CDNA ID no. 25447015
  misc_feature: Homolog of GI Number: 37748427 NR Desc: MGC69148 protein
  misc_feature: Homolog of GI Number: 50603706 NR Desc: MGC82817 protein
  misc_feature: Homolog of GI Number: 56605994 NR Desc: similar to mouse 1500009M05Rik protein
  misc_feature: Homolog of GI Number: 50746903 NR Desc:  similar to RIKEN cDNA 1500009M05
  misc_feature: Homolog of GI Number: 27696657 NR Desc: similar to RIKEN cDNA 1500009M05
  misc_feature: Homolog of GI Number: 21358227 NR Desc: CG1458
  misc_feature: Homolog of GI Number: 57048054 NR Desc:  similar to Uncharacterized hematopoietic stem/ progenitor cells protein MDS029
  misc_feature: Homolog of GI Number: 55622992 NR Desc:  similar to RIKEN cDNA 1500009M05
MASPFCAAAAACRLAVPAPSPPAARAPRPRRGLVAVRAEAGGGINPAIRKEEDKVVDTVLTGELAKPLTAYCRCWRSGTFPLCDGSHVKHNKATGDNVGPLLVKK

SEQ ID NO: 9207 - DNA, 1195 bp, Zea mays
  misc_feature: Ceres CLONE ID no. 1496101
  misc_feature: Ceres CDNA ID no. 40352001
  CDS (122)..(916): REFERENCED BY SEQ ID NO: 9208
ggcaggcgcaaaagccatcaacctctgtgcagctacaggacagcgtgcttgtgagtggctgttagggtgcttgcgttgcgttgcagtgcagaggacactgacggacggcgaagaatcgaagatggaggcgtacgctgctggagccaagttcgactgcttgctgttcgacatggacgacactctgtacccgctgagccttggcatcaacctagcatgccgcaagaacatacaggagtacatgctgaagaagctgcggatcgaggagagccaggtccccaggatgtgcctggacctgtacagggagtatgggaccacaatggccggcctcaaggttttggggtacgatttcgactacgacgacttccacgcctgcgtgcacgggacgctgccgtacgagaaggtgaagcctgacccggtgctcaggcagctgctgctttccctgccgcagaggaagatcatcttcaccaactccgacaaggccaacgcggccagagtcctggagaagctcggcctccaggactgcttccaagggatcgtctgcttcgagaccctgaacccgccaccaccaaccgagaccgagaagaacagtggcggcagtgctgggacgatcctgtgcaagccctcactggcgtccatggaagccgtcatcgagatcgccaagctcgacgccgagagaacggtgttctttgacgacagcgcgcgcaacatcgccgcagggaaggccgccggtttccgcaccgtcatcgtggggagctcggcgctggtgccaggggcggacgtggcgctggagagcatccacaacatcaaggaggcgctgccggagctctgggaggttgccgccgccgctgccgccggcgaccgcgtcgacgccgtcctccggtccaccaccgccgtggagaccacagtgattgcctgagcaataataccatgtgacattaaccgtcacggactcaaggtcacggccacgtaatataatgctgccgtgtagtatttctcgtgcctgattaagtaccgaccgaggtaactaatactactgtatgtaccagaccagaactttacggttacgggtaataaggtttgtatagctcatccctgtcggcccgtgcttttttatggcgcggtccgtggtgcaaatggatgccacgtactgaatgcaaatatatataaaaaatgctttgtccaaaaaaaaaaaaaa

SEQ ID NO: 9208 - protein, 264 aa, Zea mays
  misc_feature: Ceres CLONE ID no. 1496101
  misc_feature: Ceres CDNA ID no. 40352001
  misc_feature (10)..(212): Pfam Name: Hydrolase PFAM Desc: haloacid dehalogenase
MEAYAAGAKFDCLLFDMDDTLYPLSLGINLACRKNIQEYMLKKLRIEESQVPRMCLDLYREYGTTMAGLKVLGYDFDYDDFHACVHGTLPYEKVKPDPVLRQLLLSLPQRKIIFTNSDKANAARVLEKLGLQDCFQGIVCFETLNPPPPTETEKNSGGSAGTILCKPSLASMEAVIEIAKLDAERTVFFDDSARNIAAGKAAGFRTVIVGSSALVPGADVALESIHNIKEALPELWEVAAAAAAGDRVDAVLRSTTAVETTVIA

SEQ ID NO: 9209 - DNA, 1048 bp, Glycine max
  misc_feature: Ceres CLONE ID no. 1497279
  misc_feature: Ceres CDNA ID no. 25893011
  CDS (3)..(848): REFERENCED BY SEQ ID NO: 9210
tagcccagctgcccatccattcccctcgccgccgccgccactccgccgctgccgccgccgagatgggtcgcgtgatccgcgctcagcgtaagggtgcgggctccgtcttcaagtcccacacccaccaccgcaagggccccgcccggttcaggtcgctcgacttcggcgagcgcaacgggtacctcaagggcgtcgtcaccgatgtcatccacgacccggggcgtggtgcgccgctggccaaggtgaccttccgccacccgttcaggtacaagcaccagaaggagctcttcttcgccgccgagggtatgtacaccggccagttcgtctactgcggacgccgagccaccctctccgtcggcaacgtcctcccgctccgctccgtccctgagggaggcgtcatctgcaacgtcgagcaccacgtcggcgaccgtggtgtcttcgccagggcctccggtgactacgccatcgtcatcagccacaaccccgacaacggcacctcaaggatcaagctcccctctggtgccaagaagattgtcccaagcagctgccgtgccatgattggtcaggttgctggtggtggcaggactgagaagccaatgctcaaggctggtaacgcctaccacaagtaccgtgtgaagaggaactcctggcctaaggtgcgtggtgtggccatgaaccctgtggagcatccccacggaggaggtaaccaccagcatattggtcacgcttccactgtccgccgtgatgcaccacctggccagaaggttggtctcattgctgccaggaggactggtcgtctcagaggccaggctgctgcctctgctgccaaggccgacaaggccacttagagctatcgttgctgtttatctatgtttgctgcctctagattacccgtcaaggacatgtattgcagtatggatgtcgtttttgctcactttggtaacctggtgatgtttgttatcagttttcgctgtcgtggtctggattcttcggtccacataaagaagattatgcatggatatttgtttgtcgaaaaaaaaaaaaaaaa

SEQ ID NO: 9210 - protein, 261 aa, Glycine max
  misc_feature: Ceres CLONE ID no. 1497279
  misc_feature: Ceres CDNA ID no. 25893011
  misc_feature (11)..(90): Pfam Name: Ribosomal_L2 PFAM Desc: Ribosomal Proteins L2
  misc_feature (96)..(231): Pfam Name: Ribosomal_L2_C PFAM Desc: Ribosomal Proteins L2
  misc_feature: Homolog of GI Number: 77556802 NR Desc: 60s ribosomal protein l2
  misc_feature: Homolog of GI Number: 19343 NR Desc: ribosomal protein L2
  misc_feature: Homolog of GI Number: 81074776 NR Desc: ribosomal protein L2
  misc_feature: Homolog of GI Number: 22135870 NR Desc: 60S ribosomal protein L2
  misc_feature: Homolog of GI Number: 12054507 NR Desc: ribosomal protein L2
  misc_feature: Homolog of GI Number: 20001 NR Desc: 60S ribosomal protein L2
  misc_feature: Homolog of GI Number: 13605569 NR Desc: AT4g36130/F23E13_20
  misc_feature: Homolog of GI Number: 798818 NR Desc: 60S ribosomal protein L2
  misc_feature: Homolog of GI Number: 67633686 NR Desc: 60S ribosomal protein L8
  misc_feature: Homolog of GI Number: 6562271 NR Desc: ribosomal protein L8 homolog
  misc_feature: Useful for increasing chlorophyll and photosynthetic capacity
  misc_feature: Useful for making bigger plants
  misc_feature: Useful for making plants with increased biomass and foliage
  misc_feature: Useful for making plants with increased biomass and foliage
  misc_feature: Useful for making plants with modified flowers
  misc_feature: Useful for making shorter plants
  misc_feature: Useful for making smaller plants
  misc_feature: Useful for sterility
MGRVIRAQRKGAGSVFKSHTHHRKGPARFRSLDFGERNGYLKGVVTDVIHDPGRGAPLAKVTFRHPFRYKHQKELFFAAEGMYTGQFVYCGRRATLSVGNVLPLRSVPEGGVICNVEHHVGDRGVFARASGDYAIVISHNPDNGTSRIKLPSGAKKIVPSSCRAMIGQVAGGGRTEKPMLKAGNAYHKYRVKRNSWPKVRGVAMNPVEHPHGGGNHQHIGHASTVRRDAPPGQKVGLIAARRTGRLRGQAAASAAKADKAT

SEQ ID NO: 9211 - DNA, 898 bp, Glycine max
  misc_feature: Ceres CLONE ID no. 1497328
  misc_feature: Ceres CDNA ID no. 25447402
  CDS (140)..(694): REFERENCED BY SEQ ID NO: 9212
ctctttagaataaacgttgaatagaacaaaatcatgttctaagtttctttagttccaatctccaactttggattgtttgttccaacgacgatgctgtccctttaacacatttgaattctacgcaatttttttaaaaaaaatgcgaaggctgctcgggaagatttctgggttcttgagcaatcgaactatggtgggagtggacaaaacagggaacaaatacttcaccagaaatgaagaggttgatggtatcgtgaaagagaaaagatgggtgatatttaaaggagaggaggatcctacctctatcccagttgaatggatatgttggctgaatgggcagcgtaaaaaggctccaactccagaggaaatgatggaattggaagcaagacgtgaacgtgttagacagaatgttgctcttctcaagaaagaagaagaagaagaaaaaataaccaaagaaggaagcaaaggcaaacgtgtcagcactggaaaagtcagtggtccagacttgaaaagttttattcagcaactcccagttttttcagaaggtaaagaggttgaagaaccacctagcgcaatgggtggcttaaggaatcctcaggagagcttagctgagaaagaaaaagatgagtctgagtcttcagagccaactggatctggtgcatcttttagaccaggaacttggcaacctccaacttgatctttcattacaaccaagggccttgccgagcttgtattagccatgcgctgtttcgaaaatccatctgagatatatttctccctcaagaattttgatataattcatgtgttatcaagtttctagaaattttaattcattgataaacctttgcttaaagaatatggccaataagacatcctgctttatgcaaaaaaaaaaaaaaaa

SEQ ID NO: 9212 - protein, 184 aa, Glycine max
  misc_feature: Ceres CLONE ID no. 1497328
  misc_feature: Ceres CDNA ID no. 25447402
  misc_feature (15)..(72): Pfam Name: Complex1_17_2kD PFAM Desc: NADH:ubiquinone oxidoreductase 17.2 kD subunit
  misc_feature: Homolog of GI Number: 79325281 NR Desc: oxidoreductase
MRRLLGKISGFLSNRTMVGVDKTGNKYFTRNEEVDGIVKEKRWVIFKGEEDPTSIPVEWICWLNGQRKKAPTPEEMMELEARRERVRQNVALLKKEEEEEKITKEGSKGKRVSTGKVSGPDLKSFIQQLPVFSEGKEVEEPPSAMGGLRNPQESLAEKEKDESESSEPTGSGASFRPGTWQPPT

SEQ ID NO: 9213 - DNA, 1425 bp, Zea mays
  misc_feature: Ceres CLONE ID no. 1497570
  misc_feature: Ceres CDNA ID no. 40041438
  CDS (40)..(1269): REFERENCED BY SEQ ID NO: 9214
atcggcaaataattccacggtccatctgtgcaagcaaagatggcacgagtgctgctcctcctcgtcctggccgcctcgctcgctgcgctggcgtcgtccaaaggtcttccggtgctcgctccggtcaccaaggacaccgccacctccctctacacaatccccttccacgacggcgccaacctcgtcctcgacatcgccggcccgctcgtctggtccacgtgcgacggcggccagccgcctgcggagatctcgtgcagcagccccacctgcctcctcgccaacgcctaccccgccccgggctgccccgcgcccagctgcggcagcgacaggcaccacaagccctgcacggcgtacccatacaacccggtcaccggcgcgtgcgccgccgggagcctcttccacaccaggttcgaagccaacaccaccgatgggaataaaccggtgagcgaggtgaacgtccgggtcctggcggcctgcgcgccgagcaagctcttggcgtcgctgccccggggctccacgggcgtggccgggctcgggggctccggcctggcgctgccggctcaggtggcgtccgcccagaaggtcgccaacaagttcctcctctgcctccccaccggcggccctggcgtggccatcttcggcggcggcccgctccctttgccgcaattcacgcagtccatggactacaccccgctggtcgccaaggggggcagccccgcgcactacatctcggccaggtcaatcaaagtggaggacacccgcgtctccgtctcagagcgcgcgctcgccaccggcggtgtgatgctcagcacaaggctgccctacgccttgctccgccgcgacgtgtaccgcccgttggtggacgcgttcaccaaggccctggcggcgcagcctgccaacggagcgcccgtggcgcgcgcagtgaagcctgtggcgcccttcgagctctgctacgacacgaagtcgctgggcatcaaccgcggcgggtactgggtgccgaacgtcctgctggcgctcgacggcgggagtgactgggcgatgaccgggaagaactcgatggtggacgtcaagccggggacggcgtgcgttgcgttcgtggagatgaagggggtggatgccggcgatggcagtgcgccggcggcgatcctcggaggagcccagatggaggacttcgtgcttgacttcgacatggagaagaagcggcttgggtttctcaggctgccgcaacttacgggttgcagcagcttcaatttcgctggaagcacctagagctctcactgcctgaaataataagtctgtttatctacactgtatttgtcgactactgcgcgtgtaataaatagtaagttattttggacattcaataaaatgcaaaattcatttggacattcaagaccaaattacttcacaaaaaaaaaaaaaaaa

SEQ ID NO: 9214 - protein, 409 aa, Zea mays
  misc_feature: Ceres CLONE ID no. 1497570
  misc_feature: Ceres CDNA ID no. 40041438
  misc_feature: Homolog of GI Number: 55669878 NR Desc: Chain B
  misc_feature: Homolog of GI Number: 56201352 NR Desc: xylanase inhibitor TAXI
  misc_feature: Homolog of GI Number: 56201272 NR Desc: xylanase inhibitor TAXI
  misc_feature: Homolog of GI Number: 47824814 NR Desc: xylanase inhibitor
  misc_feature: Homolog of GI Number: 47824820 NR Desc: xylanase inhibitor
  misc_feature: Homolog of GI Number: 23954367 NR Desc: xylanase inhibitor
  misc_feature: Homolog of GI Number: 62996368 NR Desc: xylanase inhibitor precursor
  misc_feature: Homolog of GI Number: 62996370 NR Desc: xylanase inhibitor precursor
  misc_feature: Homolog of GI Number: 62996372 NR Desc: xylanase inhibitor precursor
  misc_feature: Homolog of GI Number: 34907228 NR Desc: putative dermal glycoprotein precursor
MARVLLLLVLAASLAALASSKGLPVLAPVTKDTATSLYTIPFHDGANLVLDIAGPLVWSTCDGGQPPAEISCSSPTCLLANAYPAPGCPAPSCGSDRHHKPCTAYPYNPVTGACAAGSLFHTRFEANTTDGNKPVSEVNVRVLAACAPSKLLASLPRGSTGVAGLGGSGLALPAQVASAQKVANKFLLCLPTGGPGVAIFGGGPLPLPQFTQSMDYTPLVAKGGSPAHYISARSIKVEDTRVSVSERALATGGVMLSTRLPYALLRRDVYRPLVDAFTKALAAQPANGAPVARAVKPVAPFELCYDTKSLGINRGGYWVPNVLLALDGGSDWAMTGKNSMVDVKPGTACVAFVEMKGVDAGDGSAPAAILGGAQMEDFVLDFDMEKKRLGFLRLPQLTGCSSFNFAGST

SEQ ID NO: 9215 - DNA, 926 bp, Zea mays
  misc_feature: Ceres CLONE ID no. 1497573
  misc_feature: Ceres CDNA ID no. 25446157
  CDS (3)..(374): REFERENCED BY SEQ ID NO: 9216
ttgcaaatggtaccattgacaaatgggaagatgatatcaggccaccgactccggatgtaaaagagagtcaacccgagtttgtggaatggaaggaggaagaagctgaacctggtgatgttgctgagaaggatactgcagttcctgatattgaggttgaaagtgagaagcagctgaattccattgacgatgttatgctttgcgatgccgagttaggagaggaaaagaagagtggtggtatgcttggatcttcagcacctgaggcagaagcagcatcacctgtttcatctgacatcgattcaatcaagcaccctgaacaagctgctgacagtgctgtatcagagtatccaatgggcgaacaaaatcctgagatatgaaatgaatttgagggcagcagagttccgctcacgtgatggcggatggcgtatgatgatggacgtgcaggaagcacttggaactggttggaccattactgtacaagcagtttgaggatcatttgtgggttttctgttctactctcttgaaggaaggtggtcccggatcatgcatctgatggagcctcaaaggttccacttagtctcatggagatgcttaggttcgatgtgtaacatattcatggagacgcaaaattcagaaagttgacttccttgcccttttccttaatcagtggggttctggttgtgtcactctggtaaatagccgataattgaataggtgatatctggtctggctacatgtccattgttgtagttggtgctatttgtacgaaagttttggctcaaatgcagtcagttgattcttgtcatatttagaacttgtttgaaatttgtgtaaacggaaaaaatatagcttctatttttcacaggtgcttggtgcttaattcatctgttataaatatagcttctatttttccaaaaaaaaaaaaaaaa

SEQ ID NO: 9216 - protein, 60 aa, Zea mays
  misc_feature: Ceres CLONE ID no. 1497573
  misc_feature: Ceres CDNA ID no. 25446157
  misc_feature: Homolog of GI Number: 50928787 NR Desc: OSJNBa0058K23.19
MLCDAELGEEKKSGGMLGSSAPEAEAASPVSSDIDSIKHPEQAADSAVSEYPMGEQNPEI

SEQ ID NO: 9217 - DNA, 1109 bp, Zea mays
  misc_feature: Ceres CLONE ID no. 1497627
  misc_feature: Ceres CDNA ID no. 25445712
  CDS (3)..(944): REFERENCED BY SEQ ID NO: 9218
gtgtccggtcccggatgccgatccgcttctatccctgcggccctccctgcccatctcccgatttccccgcgtgcgctctctctctccgtcggcgacgagcctgggcgaccagcgccgccgcccctagcccaggtctccatcggacgcttcgctggtcttgtttagacccaccgccggcaacgagcaactcttgttatcggatcccgcatcgtggaatgcttgccaaagggaggaaggtagctggaaggcgtgaagaaatgtctgcaaattatgcgtttggaccacaggatgatgatgcgattattaaacacaggcttctgactaggacaacgaccaccaggggtgaaccgccactaaagaagcttcagaagaagttcatgtcctttgcaactgagatcgagaaggatgcagataacataagtgactgtgaaaaactgtacaaggcctttctacatgaaattaacacctttgagctacctcttctgaaaagcaaggctgtggttgatgcaaacattagggagaaagaaagctttaatgagctgcaggttgagattgagcggcagatcttgcatgctaagactgatattgaggaccttaagaagcaacttgagcagagcaagattgagaggcagcacaaagaagagtgtgaagccatccggaagctgattagtttgcagcctccacggtcagaaactgaaaaactcattgcagaccttgagaaggagataactgatttgaaggcggagaatgtagcatgcataaggactttggaactgaggaagaagcagtttgcccttcttctacatgtggttgaggaattgcagatctcgattgaagatgagcagaagagtatagcagatgagctgagagctattgctggagagcagaagatgagcatggaagaagggagcgtcggtgcttcagattccatggttgttgactgatcgagatacattcacatatgttgcagacctgcttgccaaaatccatcacatggtttttggacaatatggcgatttggtagatgtcttttgcggtgtctttgtacctcatgtaaattgaactgtatgctagtatgaagtgaaattgaagtaaaaaaaaaaaaaaaa

SEQ ID NO: 9218 - protein, 242 aa, Zea mays
  misc_feature: Ceres CLONE ID no. 1497627
  misc_feature: Ceres CDNA ID no. 25445712
  misc_feature: Homolog of GI Number: 38566184 NR Desc: Nif3l1bp1
  misc_feature: Homolog of GI Number: 32450259 NR Desc: Nif3l1bp1
  misc_feature: Homolog of GI Number: 27769070 NR Desc: 1500006O09Rik protein
  misc_feature: Homolog of GI Number: 24654586 NR Desc: CG17143
  misc_feature: Homolog of GI Number: 57101116 NR Desc:  similar to NIF3L1BP1 protein
  misc_feature: Homolog of GI Number: 24654589 NR Desc: CG17143
  misc_feature: Homolog of GI Number: 54641251 NR Desc: GA14344
MLAKGRKVAGRREEMSANYAFGPQDDDAIIKHRLLTRTTTTRGEPPLKKLQKKFMSFATEIEKDADNISDCEKLYKAFLHEINTFELPLLKSKAVVDANIREKESFNELQVEIERQILHAKTDIEDLKKQLEQSKIERQHKEECEAIRKLISLQPPRSETEKLIADLEKEITDLKAENVACIRTLELRKKQFALLLHVVEELQISIEDEQKSIADELRAIAGEQKMSMEEGSVGASDSMVVD

SEQ ID NO: 9219 - DNA, 481 bp, Zea mays
  misc_feature: Ceres CLONE ID no. 1497698
  misc_feature: Ceres CDNA ID no. 40352002
  CDS (49)..(366): REFERENCED BY SEQ ID NO: 9220
gttttggcagcggacgacgccggcaccgagcttcaccgaatagcaaaaatggtgaacattcctaagactaagaagacttactgtaagaacaaggaatgcaagaagcacactttgcacaaggtgacccagtacaagaagggtaaagacagtcttgctgcccaaggaaagcgtcgttatgaccgcaagcaatctggatatggtggtcagaccaaacccgtcttccacaagaaggctaagacaaccaagaagattgtgctgaggctccagtgccaaacctgcaagcatttctctcaacactcaattaagaggtgcaagcattttgagattggtggagacaagaagggaaaaggaacatccctcttttaagttgttacctctttatcaatttttttcatcttttgttggtactcgtcttgctaagacattcacttacattttgaatcttacagaaatggttatggacccaaaaaaaaaaaaaaaa

SEQ ID NO: 9220 - protein, 105 aa, Zea mays
  misc_feature: Ceres CLONE ID no. 1497698
  misc_feature: Ceres CDNA ID no. 40352002
  misc_feature (19)..(95): Pfam Name: Ribosomal_L44 PFAM Desc: Ribosomal protein L44
MVNIPKTKKTYCKNKECKKHTLHKVTQYKKGKDSLAAQGKRRYDRKQSGYGGQTKPVFHKKAKTTKKIVLRLQCQTCKHFSQHSIKRCKHFEIGGDKKGKGTSLF

SEQ ID NO: 9221 - DNA, 824 bp, Zea mays
  misc_feature: Ceres CLONE ID no. 1497928
  misc_feature: Ceres CDNA ID no. 35383439
  CDS (56)..(550): REFERENCED BY SEQ ID NO: 9222
atctttccaacatccgcggaacacagacctctctctcaaaccctaatcgacgacgatgatgctcaggcaagctgcgaagaaggctctaggcctcacgtcacgccaatcgaccccgtgttccgttggtatctcccgatcctaccacgagaacgtcatcgaccactacgacaacccccgcaacgtcgggtctttcgacaagaacgatcccagcatcggcacgggcctcgtcggagctcccgcgtgcggtgatgtgatgaagcttcagatcaaggtcgatgagaagaccggtcagatcgtcgatgctcggttcaagacctttggttgtggctccgctatcgcctcttcatctgtcgccactgaatgggtgaaaggcaaagctatggaggaagttctgaccatcaaaaacactgagattgcgaagcatctttctctcccaccagtgaagctccattgcagtatgttggcggaggacgccatcaaggcagctgtgaaagactacaaggagaagcgtgtgaaggcaaacggtgttggagaaagctcacaggcttgatttccttttgatcatgtttataccataatgtgtatatgatggtgaaaacgggggaggtgtagaagaggattacgtacaacttatctggggtatgttctcttaaggttgaagtttaagaagtattttgaataaactctgttggacagaaaacatctgagaagaatgatttccttttgatgttttatgttttgtaatgacttttttttttctttgggagatttatatctattaaagaccagtcgataatcttttctttctaaaaaaaaaaaaaaaa

SEQ ID NO: 9222 - protein, 164 aa, Zea mays
  misc_feature: Ceres CLONE ID no. 1497928
  misc_feature: Ceres CDNA ID no. 35383439
  misc_feature (28)..(155): Pfam Name: NifU_N PFAM Desc: NifU
  misc_feature: Homolog of GI Number: 19548021 NR Desc: AT4g22220/T10I14_50
  misc_feature: Homolog of GI Number: 21595581 NR Desc: nifU
  misc_feature: Homolog of GI Number: 7267164 NR Desc: putative NifU
  misc_feature: Homolog of GI Number: 34912076 NR Desc: putative nifU
  misc_feature: Homolog of GI Number: 82937835 NR Desc: Fe
  misc_feature: Homolog of GI Number: 51854290 NR Desc: putative nifU
  misc_feature: Homolog of GI Number: 16798388 NR Desc: iron
  misc_feature: Homolog of GI Number: 55638805 NR Desc:  similar to ISCU2
  misc_feature: Homolog of GI Number: 61873066 NR Desc:  similar to iron
  misc_feature: Homolog of GI Number: 56699456 NR Desc: iron
MMLRQAAKKALGLTSRQSTPCSVGISRSYHENVIDHYDNPRNVGSFDKNDPSIGTGLVGAPACGDVMKLQIKVDEKTGQIVDARFKTFGCGSAIASSSVATEWVKGKAMEEVLTIKNTEIAKHLSLPPVKLHCSMLAEDAIKAAVKDYKEKRVKANGVGESSQA

SEQ ID NO: 9223 - DNA, 809 bp, Zea mays
  misc_feature: Ceres CLONE ID no. 1498572
  misc_feature: Ceres CDNA ID no. 40352003
  CDS (140)..(580): REFERENCED BY SEQ ID NO: 9224
aaaggaaaacaatagggttctctcactcacgaacagaaaggaggaggcggcggcggcggcggcggcggctgggagatctcgcatcggcggcggcgcgcgtgaaggtttctttccttgctgttagggcatcacaaggaaaatggcaagcagagcaggtggcgatggcaaagaacccataaatgagcaagtagttgcaaatacctatgccaacatgcgcactgaaatgaaccagctctacaccaagatcacggagctggaaatggaagtcagtgagcacgcccttgtgattggcgcaatagagcccctggaccccacaaggcgttgctacaggatgattggcggagtcttggttgagaggaccatcagggaagtcttgcccgccgtgcaccgcaacaaggagggccttgaagaggtcgtcgctcgcatgaaggaggctctggagaggaagaagcaagagatcaccgagtttgagctcaagtacaagatcaggatcaggaagggcgacaacagcgccaacgaagaaggcagcatgaaggaagcctctgcccagggtgttcttgttggccttgcgggccagtagagcagaatggcagggcaaggagacttgcacagttctttatcgaagccagattgcttgttaccggatgccaacctgacagtgattgtgtgtttctgggtgcagtttatcatgctacacctatgcagtactgttgaatcctcgcgtgtaaaactagagattatggtagatcaggactctgttcgtaaactgcagattttgcgctggttgtgtcagaaaaaaaaaaaaaaaa

SEQ ID NO: 9224 - protein, 146 aa, Zea mays
  misc_feature: Ceres CLONE ID no. 1498572
  misc_feature: Ceres CDNA ID no. 40352003
  misc_feature (16)..(121): Pfam Name: KE2 PFAM Desc: KE2 family protein
MASRAGGDGKEPINEQVVANTYANMRTEMNQLYTKITELEMEVSEHALVIGAIEPLDPTRRCYRMIGGVLVERTIREVLPAVHRNKEGLEEVVARMKEALERKKQEITEFELKYKIRIRKGDNSANEEGSMKEASAQGVLVGLAGQ

SEQ ID NO: 9225 - DNA, 617 bp, Zea mays
  misc_feature: Ceres CLONE ID no. 1498577
  misc_feature: Ceres CDNA ID no. 25446158
  CDS (147)..(365): REFERENCED BY SEQ ID NO: 9226
atcacaagcatactccatccagtacaatactgttggtctagccggcggcggccgcgtccctcatccagtcatcccctttccgcgatcaaaaccgagctagggttttaggtgcgggggagagggtgaggagcggacggaggcgcgccatggacaaccccgagatgcagcggttccttcagcaagagcagcaaaaggcgatgatgaacgagatggttggcaagctaacgagcgtgtgctgggacaagtgcatcactagcgctcccgggagcaagttcagttccggggaatcaacctgcctgaccaactgcgcccagaggtttctcgacatgagcgtgatgattgccaaacgctttgagatgaagtgaggcgtcgacgccgaaagctgttacctagtcaatcaccctgagttttttaaccctttgatttgaggttccattgagcacttcgaacgattcaacagagtttaatgtactttctatattgtatctactgcctcgttgggcaacgtgttgaagtgtgatttgagccggttgaaactggattatgtacactttctgtcctgagtttaactaaagtttagcccgtgtcacgtaaattgtttaaaaaaaaaaaaaaaa

SEQ ID NO: 9226 - protein, 72 aa, Zea mays
  misc_feature: Ceres CLONE ID no. 1498577
  misc_feature: Ceres CDNA ID no. 25446158
  misc_feature (7)..(72): Pfam Name: zf PFAM Desc: Tim10/DDP family zinc finger
  misc_feature: Homolog of GI Number: 50947997 NR Desc: putative small zinc finger
  misc_feature: Homolog of GI Number: 21592903 NR Desc: small zinc finger
  misc_feature: Homolog of GI Number: 5107157 NR Desc: small zinc finger
  misc_feature: Homolog of GI Number: 77548554 NR Desc: small zinc finger
  misc_feature: Homolog of GI Number: 77553573 NR Desc: SET domain protein 105
  misc_feature: Homolog of GI Number: 57227509 NR Desc: itochondrial import inner membrane translocase subunit tim8
  misc_feature: Homolog of GI Number: 54643192 NR Desc: GA14436
  misc_feature: Homolog of GI Number: 48138379 NR Desc: similar to Mitochondrial import inner membrane translocase subunit Tim8
  misc_feature: Homolog of GI Number: 5107159 NR Desc: small zinc finger
MDNPEMQRFLQQEQQKAMMNEMVGKLTSVCWDKCITSAPGSKFSSGESTCLTNCAQRFLDMSVMIAKRFEMK

SEQ ID NO: 9227 - DNA, 741 bp, Zea mays
  misc_feature: Ceres CLONE ID no. 1498602
  misc_feature: Ceres CDNA ID no. 36707532
  CDS (64)..(504): REFERENCED BY SEQ ID NO: 9228
aaccaaacgcgctagggtttccgcaccgcacctctagtcctccaccccaccccactaccggcgatggccaccgcggcggcgcagggcggtagcgacaagccggcgctccggaagcccgtcttcaccaaggtcgaccagctcaagccgggcactaacgggcacaccctcaccgtcaaggtcgtcagcgccacccccgtgcccggccgcgcgcgcccgggcgcacccgccgccgcctcgtcccgcgcgccgcgcatcgccgagtgcctcgtcggagacgagaccggcgtcatcgtattcaccgcccgcaacgaccaagttgatttgctgaagcccgatgccacggtgatcttgcgcaatgccaaaatagacatgttcaaaggatcaatgaggcttgcagtggacaaatgggggcggattgaggctacagagccagctagcttcacagtgaaggaagacaacaacttgtcccttgtagagtatgaattggttaacgtggctgaataaccgtcgaatcgtttcttgcccccccttacttctttttcacgcacgccataagatgataagaaaacgaacagcatctcgaagctgagtttatttgttacggtggtcgataaggtcaaggcttctgctgttacacctttggatccaatccattaagatgaattacccttgcatctattgtaattgtgtggttatccaaaaagggtgcagttaatcattactataaaaaaaaaaaaaaaa

SEQ ID NO: 9228 - protein, 146 aa, Zea mays
  misc_feature: Ceres CLONE ID no. 1498602
  misc_feature: Ceres CDNA ID no. 36707532
  misc_feature: Homolog of GI Number: 34904470 NR Desc: OSJNBa0086P08.14
  misc_feature: Homolog of GI Number: 57900332 NR Desc: DNA
  misc_feature: Homolog of GI Number: 34909622 NR Desc: P0435B05.31
  misc_feature: Homolog of GI Number: 25329540 NR Desc: probable tyrosyl
MATAAAQGGSDKPALRKPVFTKVDQLKPGTNGHTLTVKVVSATPVPGRARPGAPAAASSRAPRIAECLVGDETGVIVFTARNDQVDLLKPDATVILRNAKIDMFKGSMRLAVDKWGRIEATEPASFTVKEDNNLSLVEYELVNVAE

SEQ ID NO: 9229 - DNA, 995 bp, Zea mays
  misc_feature: Ceres CLONE ID no. 1498613
  misc_feature: Ceres CDNA ID no. 40041439
  CDS (87)..(887): REFERENCED BY SEQ ID NO: 9230
aatccccttccaaatcttcattgcacatctcatagtgtgttcagctgtctccttccccgctggcctgctctctctgctgctccaccatgaggcaagtagggagcccattggacctgaacaacttgccggaggagtacggcaagcaaggggtagagagctccacgaccaccgccacatcaagctcccatgcagttaggacagggataaagaagaagggcgatggagggaaagacgatgctgcgaaggtgtatgagtgccggttttgctccctcaagttcggcaagtctcaagcgcttggcggccatatgaaccgccatcgacaagagagggagactgaaaccctcaaccgtgcccggcaactcgtcttcggcaacgagagcctcgccgccatcggggcgcaggcgcagatgactttcagggatgtaaatatggctggcgctgccccaccgaccgtattgggaggaaacttccggggaggcgccagcgccaccggtggcagcagcgtcggcgacccgtgtctcccgttccggccggtgcatccggggctatcgtcgcagccttcgtaccattacctctacacggcgccatccacactgcatccgatgagctacccgccggcgacgtacccgggcccaccgcgtcagcctgcggtcggcgactatgtcatcggtcacgcagtctccgccggtggcggtgacgcactgatgcagtcgacacaccgcagcagcttctcttgcttcggagctccactcaccgctccgccggcagcagcggcggcgggggctgctgctgctgctatgaacgtgcaggccgacaagcttaactgcaactgcagcttcggctgcggtggccacagcagaaataataacgtgaatgcgtccacttgagcagatgcggaccgcacgctgtggttaatgcatgcaattaagtcagtgtaaagagccaagaaattaaattagatgatgcgtgttttcgacataaaaaaaaaaaaaaaa

SEQ ID NO: 9230 - protein, 266 aa, Zea mays
  misc_feature: Ceres CLONE ID no. 1498613
  misc_feature: Ceres CDNA ID no. 40041439
  misc_feature: Homolog of GI Number: 34895530 NR Desc: C2H2 zinc
  misc_feature: Homolog of GI Number: 79375919 NR Desc: JAG
  misc_feature: Homolog of GI Number: 79343485 NR Desc: nucleic acid binding / zinc ion binding
MRQVGSPLDLNNLPEEYGKQGVESSTTTATSSSHAVRTGIKKKGDGGKDDAAKVYECRFCSLKFGKSQALGGHMNRHRQERETETLNRARQLVFGNESLAAIGAQAQMTFRDVNMAGAAPPTVLGGNFRGGASATGGSSVGDPCLPFRPVHPGLSSQPSYHYLYTAPSTLHPMSYPPATYPGPPRQPAVGDYVIGHAVSAGGGDALMQSTHRSSFSCFGAPLTAPPAAAAAGAAAAAMNVQADKLNCNCSFGCGGHSRNNNVNAST

SEQ ID NO: 9231 - DNA, 733 bp, Zea mays
  misc_feature: Ceres CLONE ID no. 1499438
  misc_feature: Ceres CDNA ID no. 25446967
  CDS (276)..(575): REFERENCED BY SEQ ID NO: 9232
agagacgctaacccaaacggacaaacccaatcagaccgaatgggcaccgcatcaccggactccggcgaccttatcgaggtggggccggcgaggccgggttcgccgtcactgccgggttcgagatcgccctcgcctgcgacatcctcgtcgctggacgctccaccaagttcttggacacccacgccaagtttgggatatttccttcctggggtctttcacagaagctttctcgcatcattgggccgaatagagcaagggaagtgtcactaacttgcatgcctgttactgctgaaatggcagagaggtgggggcttgttaaccacgtcgtggatgataatgaggtgctgagtaaggcgatagaggttgctgaggctattgtgaggaacaaccgcaacttagttgtattgtacaaatcggttataaatgatggatttaagctggatttggagcatgctcaagcacttgagaaggaaagaggtcacaactattacaatggaatgacaaaggaacagttcacgaatatgcagaaattcatccagggccggagttctaagaaaacaccatcaaagctgtaggttgctggtgacattttctgtggtccgtgtacgatgtacagctactgaaagcgtgttcagtagtctgaaaaataaagatgtcggtgtggcaatatatacagttaccgtcttctcatacttttacgtaagtttatgtttatttaaaaaaaaaaaaaaaa

SEQ ID NO: 9232 - protein, 99 aa, Zea mays
  misc_feature: Ceres CLONE ID no. 1499438
  misc_feature: Ceres CDNA ID no. 25446967
  misc_feature: Homolog of GI Number: 6469117 NR Desc: putative enoyl CoA hydratase
  misc_feature: Homolog of GI Number: 48958507 NR Desc: At4g16210
  misc_feature: Homolog of GI Number: 16125967 NR Desc: enoyl
  misc_feature: Homolog of GI Number: 48849806 NR Desc: COG1024: Enoyl
  misc_feature: Homolog of GI Number: 79041078 NR Desc: enoyl
  misc_feature: Homolog of GI Number: 61099888 NR Desc: enoyl
  misc_feature: Homolog of GI Number: 82523898 NR Desc: Enoyl
  misc_feature: Homolog of GI Number: 20162438 NR Desc: crotonase
  misc_feature: Homolog of GI Number: 68538307 NR Desc: Enoyl
  misc_feature: Homolog of GI Number: 57228989 NR Desc: enoyl
MPVTAEMAERWGLVNHVVDDNEVLSKAIEVAEAIVRNNRNLVVLYKSVINDGFKLDLEHAQALEKERGHNYYNGMTKEQFTNMQKFIQGRSSKKTPSKL

SEQ ID NO: 9233 - DNA, 665 bp, Zea mays
  misc_feature: Ceres CLONE ID no. 1499819
  misc_feature: Ceres CDNA ID no. 25446159
  CDS (90)..(326): REFERENCED BY SEQ ID NO: 9234
aagtgcggcgccgcggttgcctgccaccgtaccgccgcaggagaaggaagaggagcccgtatccctccgccccgctgcccgccggaccgatggactccgagcactggatctcgcgcctggccgccgcgaagcgcttctacgcggcgcagctcggccacagcgatcgggccgggatggacgagctggagatggacgaggaggtcaggcccgagttcccctgcccctactgctacgaggaccacgacgtcggatccctctgcgcgcacctggaggaggagcacccgttcgaaccccaagccgcgtatcgattcgtcgctcacaagtgaagaaagggagctgaagcggaagcaagcccgcgtcagagccacgttcgtgcaggacctgctgctctctactctattcggcgactgatgacgaaccagagcgagcctaagctattatcactggaagggtggaggtccacgaagaccagcgcggcggtccagaacacctctagtaaggtgcagagttgatgtgggcgtaatgtatctttctaagttattgtaagccggtctcttgtcttcacaactgacgatctgtgtgtggtacgctacgcacgcaagtcgcggttgtgcgtgtacgtctgaactctggagcattggtttgttgtaccaaaaaaaaaaaaa

SEQ ID NO: 9234 - protein, 78 aa, Zea mays
  misc_feature: Ceres CLONE ID no. 1499819
  misc_feature: Ceres CDNA ID no. 25446159
  misc_feature (10)..(67): Pfam Name: Di19 PFAM Desc: Drought induced 19 protein
  misc_feature: Homolog of GI Number: 50907317 NR Desc: putative fiber protein Fb2
  misc_feature: Homolog of GI Number: 56201905 NR Desc: fiber protein Fb2
  misc_feature: Homolog of GI Number: 45752696 NR Desc: At5g26990
  misc_feature: Homolog of GI Number: 25992529 NR Desc: fiber protein Fb2
  misc_feature: Homolog of GI Number: 66271049 NR Desc: Fb2
  misc_feature: Homolog of GI Number: 30696097 NR Desc: drought
  misc_feature: Homolog of GI Number: 34911028 NR Desc: P0007F06.9
MDSEHWISRLAAAKRFYAAQLGHSDRAGMDELEMDEEVRPEFPCPYCYEDHDVGSLCAHLEEEHPFEPQAAYRFVAHK

SEQ ID NO: 9235 - DNA, 924 bp, Glycine max
  misc_feature: Ceres CLONE ID no. 1500076
  misc_feature: Ceres CDNA ID no. 25403134
  CDS (86)..(655): REFERENCED BY SEQ ID NO: 9236
gatcaatccattgaatctcttctagtgctcggaaaccgcagactccccgcccagctatagacaagcgcgcgccccgatcgaagggatggccggcaccgttgaggacagcgggaacacggcgccgtcgtcgccggccgggctccgcggcgccgacctggccctgagggtgcttctgttcgccgtctcgttgtcggggctcgtcgtgctggtcaccgccaagcagacggagatggtgcccctggtcctgacgccgccgttcagattcgggccggtgcccgcccagttcaaagactcgccagcgctcatttatcttcttgtggcgctgtgcatgacgagcttgtatagccttctgacggccgccacctcggtcaagtccatgtcaagttcggcttcctgtgccaaggggatcttcgtcctcattctgcttgatgtggtttacgcgggcatcatggcgtcggcgacgggcacggcgggggccgtggcctgggtggggctgaagggcaactcgcacacgcggtggaacaagatctgcaacatctacggcaagttctgccggcacatcggcagcgccacctgcctcggcctcatcgcctccatcatcctcgtcctcctcgtcgtcctcaacgcctactccctctaccggagaagccgctgatcgaactaggcgtccagccccgctccctcctccggctggcgggacaaatttcatgtgccgtgcatgtcatccgtcggctttggtgagctctgccggccggcggtcagttgtataaaagatgctacgtgttcctgtggctgtggagtgctctacgacatgcgtgtgtgcgtgcgtgtacatgtgcgttgacgtttatccttgtttgtttctacaacacgttgctttgtgacagtaagcacgacttttatcggtcaaaaaaaaaaaaaaaa

SEQ ID NO: 9236 - protein, 189 aa, Glycine max
  misc_feature: Ceres CLONE ID no. 1500076
  misc_feature: Ceres CDNA ID no. 25403134
  misc_feature: Homolog of GI Number: 50936677 NR Desc: integral membrane protein
  misc_feature: Homolog of GI Number: 50909851 NR Desc: integral membrane
  misc_feature: Homolog of GI Number: 50929767 NR Desc: OSJNBa0088H09.7
MAGTVEDSGNTAPSSPAGLRGADLALRVLLFAVSLSGLVVLVTAKQTEMVPLVLTPPFRFGPVPAQFKDSPALIYLLVALCMTSLYSLLTAATSVKSMSSSASCAKGIFVLILLDVVYAGIMASATGTAGAVAWVGLKGNSHTRWNKICNIYGKFCRHIGSATCLGLIASIILVLLVVLNAYSLYRRSR

SEQ ID NO: 9237 - DNA, 710 bp, Zea mays
  misc_feature: Ceres CLONE ID no. 1501277
  misc_feature: Ceres CDNA ID no. 25446023
  CDS (176)..(331): REFERENCED BY SEQ ID NO: 9238
ggagcagggcaggggttgcgtcctggttgtgttgttgtaagctcccaggtttcttctcttcgcgtgagctaactagactagagtgggatcgcgaggaagaaggatgtcgtgctgcggaggaaactgcgggtgcggcagcggatgcaagtgcggcagcgggtgcggagggtgcaagatgtacccggacatggctgagcaggtgaccaccaccaccaccatcatgggtgttgcaccatccaagggcgggttcgaggcggccgccggagctgagaacggcgggtgcaagtgcggcgccgccagctgcacctgcgacccctgcacctgcaagtgaggatgaccgggtgcagcatgcaggccgtgacgatggaggaagtagatcggaaggacacccttcagtatctctagctaaatcaagctctgagagtatgttgtagcagcgtcgtctgtgtttgccgccatgcgtagctagctagctagtggtggtaaacgaataattgtcctgttcttcttcctcctcggcccctgccagtgttgcgtcgtgtgggccggccgggtgcatgcacagcaccaggccatgcccgctgctatgtaagtgctcgagccagtagcatcgtaactcggtttgttaccgctagagctcgagccagttcgagagtagccattttaaaatgaagtctgcgcttgtgtgttatggaaaaaaaaaaaaaaaa

SEQ ID NO: 9238 - protein, 75 aa, Zea mays
  misc_feature: Ceres CLONE ID no. 1501277
  misc_feature: Ceres CDNA ID no. 25446023
  misc_feature (1)..(74): Pfam Name: Metallothio_2 PFAM Desc: Metallothionein
  misc_feature: Homolog of GI Number: 55416162 NR Desc: metallothionein
  misc_feature: Homolog of GI Number: 46358913 NR Desc: metallothionein
  misc_feature: Homolog of GI Number: 13491970 NR Desc: metallothionein
  misc_feature: Homolog of GI Number: 32400768 NR Desc: metallothionein
  misc_feature: Homolog of GI Number: 46850185 NR Desc: metallothionein 2a
  misc_feature: Homolog of GI Number: 15825501 NR Desc: type 2 metallothionein
  misc_feature: Homolog of GI Number: 34895842 NR Desc: putative metallothionein
  misc_feature: Homolog of GI Number: 3901014 NR Desc: metallothionein
  misc_feature: Homolog of GI Number: 56549629 NR Desc: metallothionein
  misc_feature: Homolog of GI Number: 13774274 NR Desc: metallothionein
MSCCGGNCGCGSGCKCGSGCGGCKMYPDMAEQVTTTTTIMGVAPSKGGFEAAAGAENGGCKCGAASCTCDPCTCK

SEQ ID NO: 9239 - DNA, 1025 bp, Zea mays
  misc_feature: Ceres CLONE ID no. 1501288
  misc_feature: Ceres CDNA ID no. 29191786
  CDS (90)..(902): REFERENCED BY SEQ ID NO: 9240
atcaagacacagaccatagtccacagcagagcaccactactactaccaccagtggcaaccctgacaaggctctagcagcttcgctaaagatggctgggctactctctgtcaaggccatcgcgctcgccgccgtgcttgctgccgcgtatgtctcttgcgccgccgctgagcagctgggggcggcggacctcgacgcctccgccgtgtcttacagctccgcgtggcttccggccagagcgacctggtacggagcgcccaacggcgccgggccggacgacaacggcggcgcgtgcggcttcaagcacgtgaaccagtacccgttctcctccatgacctcctgcggtaaccagcccctgttcaaggacggcaagggctgcggctcctgctaccagatacggtgcacaggcgacaaatcctgctccggaaagatcgagacggtgatgatcaccgacatgaactactaccccgtggcccagtaccacttcgacctgagcggcacggccttcggcgcgctggccaagtcgggcctcaacgagaagctccgccactcgggcatcatcgacatccagttccggagggtgccctgcaacttccccggcctcaagatcaacttccacgtggtggacggctctaacgcggtgtacctggcggtgctgatcgagtacgaggacatggacggcgacgtgatccaggtggacatgaaggaggccaagtcggggtcgtggatggccatgcgcgagtcctggggatccatctggcggatggactccaaccaccgcctccaggggcccttctccatgcgcatcaccagcgactccggcaagaagctggtggccaacgatgtcatcccggccaactggaggcccaacaccgactaccgctccttcgtccagttcagctgatccgaccgacccatgggcagccacgtgcgcctgcatcatgcatgcatgcgctctggcccctctgctgcctacggattaatcactcggccgatcgaaatcatttgccttaaaaaaaaaaaaaaa

SEQ ID NO: 9240 - protein, 270 aa, Zea mays
  misc_feature: Ceres CLONE ID no. 1501288
  misc_feature: Ceres CDNA ID no. 29191786
  misc_feature (173)..(254): Pfam Name: Pollen_allerg_1 PFAM Desc: Pollen allergen
  misc_feature (82)..(161): Pfam Name: DPBB_1 PFAM Desc: Rare lipoprotein A
  misc_feature: Homolog of GI Number: 51242713 NR Desc: beta
  misc_feature: Homolog of GI Number: 44894806 NR Desc: expansin EXPB7
  misc_feature: Homolog of GI Number: 14330328 NR Desc: beta expansin B2
  misc_feature: Homolog of GI Number: 37536756 NR Desc: beta
  misc_feature: Homolog of GI Number: 44894800 NR Desc: expansin EXPB3
  misc_feature: Homolog of GI Number: 51242711 NR Desc: beta
  misc_feature: Homolog of GI Number: 14330330 NR Desc: beta expansin B3
  misc_feature: Homolog of GI Number: 44894796 NR Desc: expansin EXPB1
  misc_feature: Homolog of GI Number: 37536762 NR Desc: beta
  misc_feature: Homolog of GI Number: 8118425 NR Desc: beta
  misc_feature: Useful for making plants with increased biomass
MAGLLSVKAIALAAVLAAAYVSCAAAEQLGAADLDASAVSYSSAWLPARATWYGAPNGAGPDDNGGACGFKHVNQYPFSSMTSCGNQPLFKDGKGCGSCYQIRCTGDKSCSGKIETVMITDMNYYPVAQYHFDLSGTAFGALAKSGLNEKLRHSGIIDIQFRRVPCNFPGLKINFHVVDGSNAVYLAVLIEYEDMDGDVIQVDMKEAKSGSWMAMRESWGSIWRMDSNHRLQGPFSMRITSDSGKKLVANDVIPANWRPNTDYRSFVQFS

SEQ ID NO: 9241 - DNA, 1055 bp, Zea mays
  misc_feature: Ceres CLONE ID no. 1501333
  misc_feature: Ceres CDNA ID no. 40352004
  CDS (73)..(861): REFERENCED BY SEQ ID NO: 9242
actgacactccaagcactagcacgctccaaggcctcactcactcaccagcgacaccccgaatccagcggcatatggcctcctccacgatgccgcgccacatcgctctcctcctgctcctcctggcgtccacgcgcgcggcgtccgcggccggcgccggcgcctgcgcggccgagaagttcccggcggggaagacatatgccaagtgcgaggacctcccgcagctgggcgccgcgctgcactggacctacgacgaggccaagtcgtcgctctcgctggcgttcgtggcggcgccggcgggtgccaacgggtgggtggcctgggcgctgaaccccaccggcgagggcatggccggcgcgcaggcgctcgtggcgctcaagggctccggctccgccgcccccaccgttaggacgtacaacatcaccggctacgtgccgctcggcaaggcctccacgcccatcgccttcccggccaccgacctcgccgccgactccggcagcggcggcaagatccggctctacggcaagctgcagctgcacagcgggatgaaggcggtgaaccacatatggcaggtcggcacctccgtcaccgccggggcccccgacaagcacgccttcgccgccggcaacctcgcctcgaagtccaagctcgtcctctcgggcaaagcggcctccgcggcctcgccttcgccggcgcccgcccccatggccggtggcccgtccggatcggccggcagcgacggcggcgcttcggcgaccacggcgccttcagccggcaagtccccgtcgggcgcggccgcggtcggcgtgtcggcgccggcactcctcgtgctcgcgttgatgggcctcctcgcggtggtatgatggcatttcctggcggtagcacgaatgaatgagtacgtactataattagtggaggtggcagtgggcatggggaggaagcatttcttgaacaatatatttgttccatttttgtcgatcgatcttgctatgctgcctattctttttcctaatttcgtttgaaataaaagatggtttgcgcaaaaaaaaaaaaaaaa

SEQ ID NO: 9242 - protein, 262 aa, Zea mays
  misc_feature: Ceres CLONE ID no. 1501333
  misc_feature: Ceres CDNA ID no. 40352004
MASSTMPRHIALLLLLLASTRAASAAGAGACAAEKFPAGKTYAKCEDLPQLGAALHWTYDEAKSSLSLAFVAAPAGANGWVAWALNPTGEGMAGAQALVALKGSGSAAPTVRTYNITGYVPLGKASTPIAFPATDLAADSGSGGKIRLYGKLQLHSGMKAVNHIWQVGTSVTAGAPDKHAFAAGNLASKSKLVLSGKAASAASPSPAPAPMAGGPSGSAGSDGGASATTAPSAGKSPSGAAAVGVSAPALLVLALMGLLAVV

SEQ ID NO: 9243 - DNA, 1119 bp, Zea mays
  misc_feature: Ceres CLONE ID no. 1501358
  misc_feature: Ceres CDNA ID no. 25446685
  CDS (407)..(904): REFERENCED BY SEQ ID NO: 9244
gaagggagaggcacagagcatccagcttcccccaacaaaggaatctccctcctccccttcctcagcagggtagccatgtttggtcttcgtgcccgcgcagcggcgcagctccagcgcccaaccccgtctccctcctccgcttcctcggcgtcgttctcgctcgcgaggctcgggtgcgcctccccgctcgccgccctcgcgcctctggcttccgcaccgccgtcgccgtcggccagggagacacagccgacctccctctccgccaggtggcctgccgcgcccatgcgtccctggggaacccgtggccaccccaggccgaccacgcgcgttctctgcactgctgccggcagcgtccaaagagaggggaaagaactgctagttcagcatttgcttgttggtgaaaaggatgtcaggcttctggttgatctcgaaaagaatatcattgcagaaggtaccagaatttgaggaggcagcatttagtgctcctttgaacaaagttgtacgatgtaagacaaaatttggatggcatctagtgcaagttcttgctgagagggatcaatgcgtactgcaagacattgacccagaagagcttcacgcaaaattgcaagaccctagttttctcgaagaagctcaattgattgatgttcgggagcctgatgaagtggagaaagcttcacttccaggcttcaaggttctaccgctccgccaatttgggacctggggaccagttatgacagacgagtttaatcctcaaaaggacacttatgttctgtgccaccatggcatgcgctcaatgcaagtggctaaatggttgcagtcacagggtttcaaaaaagtttacaatgttgcgggtggaattcatgcctatgcggttaaagccgactcctctatcccaacgtattagaggatcctcatggtgacactttagcacggctgccggctgggaacttctcatatatcttaggcattgacgttgatcaatgcttgaattcagagctcaattttatttctcatactgtgtatcagaaagttttgggactcctagggaggaaaaatatacagctatttttgttaaaaaaagatacttgagaaattgctttaaaaaaaaaaaaaaaaaaa

SEQ ID NO: 9244 - protein, 165 aa, Zea mays
  misc_feature: Ceres CLONE ID no. 1501358
  misc_feature: Ceres CDNA ID no. 25446685
  misc_feature (16)..(47): Pfam Name: Rotamase PFAM Desc: PPIC
  misc_feature (62)..(157): Pfam Name: Rhodanese PFAM Desc: Rhodanese
  misc_feature: Homolog of GI Number: 50509156 NR Desc: peptidyl
  misc_feature: Homolog of GI Number: 16323478 NR Desc: putative peptidyl
  misc_feature: Homolog of GI Number: 21554407 NR Desc: peptidyl
  misc_feature: Homolog of GI Number: 2246380 NR Desc: peptidyl
  misc_feature: Homolog of GI Number: 51849615 NR Desc: trypsin
  misc_feature: Homolog of GI Number: 23127749 NR Desc: COG0607: Rhodanese
  misc_feature: Homolog of GI Number: 45526138 NR Desc: COG0607: Rhodanese
  misc_feature: Homolog of GI Number: 67922505 NR Desc: Rhodanese
  misc_feature: Homolog of GI Number: 45508369 NR Desc: COG0607: Rhodanese
  misc_feature: Homolog of GI Number: 67929370 NR Desc: Rhodanese
MSGFWLISKRISLQKVPEFEEAAFSAPLNKVVRCKTKFGWHLVQVLAERDQCVLQDIDPEELHAKLQDPSFLEEAQLIDVREPDEVEKASLPGFKVLPLRQFGTWGPVMTDEFNPQKDTYVLCHHGMRSMQVAKWLQSQGFKKVYNVAGGIHAYAVKADSSIPTY

SEQ ID NO: 9245 - DNA, 1066 bp, Zea mays
  misc_feature: Ceres CLONE ID no. 1501439
  misc_feature: Ceres CDNA ID no. 40041440
  CDS (93)..(884): REFERENCED BY SEQ ID NO: 9246
ctcgatcggcctggcactggcagtcgcttccctttcccaccacgttgacatctcttccgctccgggaaggaggcaggcacgtagacgtagcgatggcgccgcgtttcctggcgtgcttcggcaggggcggcgcgacggcctcggcgccggagcctgtggaggacctggccccgggcccggtgctggtggagctcttctcctcgcaggggtgcgcggcgtcgcctgaggcggacgcccttgtggcgcggctggcgcaggagtcctccgaggccggcggcggcgagcgagcgatggtggtgctggggttccacgtcgactactgggactaccgcgggtggaaggaccccttcgcgtccagcgcctggaccgtgcggcagaaggcgtacgtggaggcgctccggctggacacgctcttcacgccgcaggtcgtcgtgcagggccgcgcggactgcgtcggcaccgagcaggacaagctcgcccaggccgtccgcgacgcgccccgctacccctcgcccgccatgaaggtgaagttccagcggccgaacccgagcacgctgcaggcgtccttcacgggcgcgctccactcccgcgtggacggcggcgggagcgtgctggtggcactgtacgagagcggcgtgatcaccgactgcggccgcggcgagaacaagggcaagtcgttgctcaacgaccacgtggtgcgccggctggagaaggtggccgccgtgcgcgacggcgcgtccgccaggaaggccgtgtccgggtccgtccagttcccgctgtgggacgacttccgcgccaccaagtgcggcctcgtcctcttcgtgcagaactcggcgctgcaggtgctcggcgtccagcacttcgacctgcccgacaacgtctgacccagtggcgggcaccaacttgcggagagcgcagggggcagacggccaggggggcgtagcacaactattctttgtagagtttgaatgattggcgtgttgcgttgttgtaatagcactttgtacgagcactcgtgtgatcgattactggaacaatggttgtatcttcaaaaaaaaaaaaaaaa

SEQ ID NO: 9246 - protein, 263 aa, Zea mays
  misc_feature: Ceres CLONE ID no. 1501439
  misc_feature: Ceres CDNA ID no. 40041440
  misc_feature: Homolog of GI Number: 50938347 NR Desc: membrane lipoprotein lipid attachment site
  misc_feature: Homolog of GI Number: 13265463 NR Desc: AT4g27350
  misc_feature: Homolog of GI Number: 23014426 NR Desc: COG5429: Uncharacterized secreted protein
  misc_feature: Homolog of GI Number: 78365562 NR Desc: similar to Uncharacterized secreted protein
MAPRFLACFGRGGATASAPEPVEDLAPGPVLVELFSSQGCAASPEADALVARLAQESSEAGGGERAMVVLGFHVDYWDYRGWKDPFASSAWTVRQKAYVEALRLDTLFTPQVVVQGRADCVGTEQDKLAQAVRDAPRYPSPAMKVKFQRPNPSTLQASFTGALHSRVDGGGSVLVALYESGVITDCGRGENKGKSLLNDHVVRRLEKVAAVRDGASARKAVSGSVQFPLWDDFRATKCGLVLFVQNSALQVLGVQHFDLPDNV

SEQ ID NO: 9247 - DNA, 583 bp, Zea mays
  misc_feature: Ceres CLONE ID no. 1501525
  misc_feature: Ceres CDNA ID no. 25445580
  CDS (1)..(342): REFERENCED BY SEQ ID NO: 9248
gcaaaaatctctgccgtgcctctcgtctctcttctcaggcgccacgcaaaacgttctccgttttccctctccggatccggcccgcgggagccaggagccaccgatgatccggaccgcaacggtgcgagcgcgtctcctcctatcgcgctcctacgtagcacaggcaaaggcagcttctcgctggcctctcgtccgctggaaggcttcgcatcttggatctgtacggtatatcatcgttctacctgcagctttctgagcatcatcgcagtagctgtgtgcggctgcgtgccctacgagtggctattgctaggccggtgcaagaacttcagcgaaggctgttaattctagcaattgggagtctgggaccacaggaaccattttgtgtatgaaactttattatatttagttcaatgctatttggctcgtgtcccaggagcatagtgtttttgttctataatcagattattaacttgaaagaatggcctttcgacgaattgaaagagcccactcaaggaacgattaataattgatgtttcatgtggaattgggaatttgtactttttgtttaaaaaaaaaaaaaaaa

SEQ ID NO: 9248 - protein, 50 aa, Zea mays
  misc_feature: Ceres CLONE ID no. 1501525
  misc_feature: Ceres CDNA ID no. 25445580
MIRTATVRARLLLSRSYVAQAKAASRWPLVRWKASHLGSVRYIIVLPAAF

SEQ ID NO: 9249 - DNA, 992 bp, Zea mays
  misc_feature: Ceres CLONE ID no. 1501569
  misc_feature: Ceres CDNA ID no. 25402225
  CDS (161)..(679): REFERENCED BY SEQ ID NO: 9250
aacccaaccggccaccaccacctcccgtcccgaccccgagacagacacctcccactcgcggccatgcccccctgccaccgccgctgctgacctgaccacccagccgtccgcgccgcgaccggtcaacatctatctagccggaacatccatctcaagcaacatggacccggcccaggaggagctcgagcgccgcagccgctacctcagctcgctcgtccgccgcaccaggctcgacgacccgccccaaccggagccggagccggagcccaaggtggagcgcaaaccggcggcggagcccagcggcggggagggcaaggccgctaagccggagaccaaggaaagggaggcggcgaaggtcaaaggggacgccgcgagcggggaggggaggaaggtggcggtgcgggtgcgcgcggcggacatgccgctggcgctgcagcggcgcgcgatctggatcgcccgcgaggtcgtcctctccacgccgcgcctcgagagcaagcgcctcgcgctcgcgctcaagaaggaattcgacacgacatacgggcctgcttggcactgcatcgtcggcacaagctttggctcctacgtcactcactccctaggaggcttcctgtacttctccgtcgacaaggcgtacattcttctcttcagaaccgctgtcgagccactgagtaaaccgtgatgaggcctggaacctatcttctcacacacaagtgtagatttagcgcaaatgtgtaatttaaactgctgttttaggtgctcgacggcagcaagtgtaagcagccgagaaggagtaacaaacatccctctatgacctttaagtatctacgtatgctgctgctgagtactgctgacctgcgaagctctcagatgtcaatttacatccttcgagccggttaaaatcatgccacggcaaggttgctaaatatgtacttcctctgttctaaattataagatgttttggtaggctaaagtagccaaaaaaaaaaaaaaaa

SEQ ID NO: 9250 - protein, 172 aa, Zea mays
  misc_feature: Ceres CLONE ID no. 1501569
  misc_feature: Ceres CDNA ID no. 25402225
  misc_feature (74)..(165): Pfam Name: Dynein_light PFAM Desc: Dynein light chain type 1
  misc_feature: Homolog of GI Number: 50924836 NR Desc: B1358B12.13
  misc_feature: Homolog of GI Number: 50253310 NR Desc: putative dynein light chain 2
  misc_feature: Homolog of GI Number: 20465367 NR Desc: putative dynein light subunit lc6
  misc_feature: Homolog of GI Number: 45752676 NR Desc: At5g20110
  misc_feature: Homolog of GI Number: 66796189 NR Desc: dynein light chain
  misc_feature: Homolog of GI Number: 34913978 NR Desc: dynein light chain
  misc_feature: Homolog of GI Number: 28829295 NR Desc: similar to Anthocidaris crassispina
  misc_feature: Homolog of GI Number: 5305393 NR Desc: dynein light chain 4
  misc_feature: Homolog of GI Number: 71998765 NR Desc: dynein light chain
  misc_feature: Homolog of GI Number: 28466885 NR Desc: At4g15930
MDPAQEELERRSRYLSSLVRRTRLDDPPQPEPEPEPKVERKPAAEPSGGEGKAAKPETKEREAAKVKGDAASGEGRKVAVRVRAADMPLALQRRAIWIAREVVLSTPRLESKRLALALKKEFDTTYGPAWHCIVGTSFGSYVTHSLGGFLYFSVDKAYILLFRTAVEPLSKP

SEQ ID NO: 9251 - DNA, 715 bp, Zea mays
  misc_feature: Ceres CLONE ID no. 1501716
  misc_feature: Ceres CDNA ID no. 35383440
  CDS (97)..(519): REFERENCED BY SEQ ID NO: 9252
accaccaatctctcagcccccacaacccccctcgctccctccatctctccggcgaccaccgtagtaccaccctaccccgtcctccccactccagcgatggcgacagcggcagccggcggcgggaggggcaagccgaaggggagcaagtcggtgtcgcggtcggtgaaggcgggcctgcagttcccggtgggccgcgtcgcccggcacctcaaggtcgggcgctacgcgaagcgcgtgggcgcgggcgcgcccgtctacctctgcgccgtcctcgagtacctcgccgccgaggccctggagctggccggcaacgcggcgcgcgacaacaagaagacccggatctcgccgcgccacatccagctcgccgtccgcaacgacgaggagctcagccggctgctcggcggcgtcaccatcgccgccggcggcgtcctgcccaacatccactccgtgctcctccccaagaaggccggcaagggcgccggcaccggcgggtccgcctcccagtcccaggagttctagagcgccagagatccgatgagtggcgtggcgtggcgtggtggtgtgatgcttttaggttggtagattagttcttcttggccagcgttcttgttggcgcgtgtatcgagggtggatctggttggaatggaatgcttgcaatctgtttcttgtctgtttggatggaatgcgctctatttctctaaaaaaaaaaaaaaaa

SEQ ID NO: 9252 - protein, 140 aa, Zea mays; identical to SEQ ID NO: 1936
  misc_feature: Ceres CLONE ID no. 1501716
  misc_feature: Ceres CDNA ID no. 35383440
  misc_feature (21)..(96): Pfam Name: Histone PFAM Desc: Core histone H2A/H2B/H3/H4
  misc_feature: Homolog of GI Number: 77555982 NR Desc: histone h2a.
  misc_feature: Homolog of GI Number: 3204129 NR Desc: histone H2A
  misc_feature: Homolog of GI Number: 297871 NR Desc: histone H2A
  misc_feature: Homolog of GI Number: 21553797 NR Desc: histone H2A
  misc_feature: Homolog of GI Number: 20334750 NR Desc: At1g08880/F7G19_24
  misc_feature: Homolog of GI Number: 21593507 NR Desc: putative histone H2A
  misc_feature: Homolog of GI Number: 571481 NR Desc: histone H2A
  misc_feature: Homolog of GI Number: 1708102 NR Desc: Histone H2A
  misc_feature: Homolog of GI Number: 121981 NR Desc: Histone H2A
  misc_feature: Homolog of GI Number: 121985 NR Desc: Histone H2A

SEQ ID NO: 9253 - DNA, 472 bp, Zea mays
  misc_feature: Ceres CLONE ID no. 1501781
  misc_feature: Ceres CDNA ID no. 36706889
  CDS (3)..(317): REFERENCED BY SEQ ID NO: 9254
agacatcgcacaagactcttgtcaacaagaccaacaacaggatgaggactgccgtgcatgctgcgctttgcattgtgcttgtgataatgtcttcaacactgtcatcttgcgaggacgatgagaaggtatctatcgcatgtgacacaggatgcaatgccgcgatctcccgtctcaaatgcttcctgatggcctattctgaagggaaagtgttggtcagcagcaactgcgaaacgccgaccaggtgcggctgcgtgtttcgtcacaaacaagatgcagcccttatcgccggcgacgttggcaacaaaaagggatactgatggcagacgtgtacttcttggttgaataatactgctagaattaatatgggcaccaacgaaatatctataatgttattcttcagtgtaatgcttccagcatgttctgatttagtttaactaaatatctatctttccccccaaaaaaaaaaaaaaaa

SEQ ID NO: 9254 - protein, 91 aa, Zea mays; identical to SEQ ID NO: 5620
  misc_feature: Ceres CLONE ID no. 1501781
  misc_feature: Ceres CDNA ID no. 36706889

SEQ ID NO: 9255 - DNA, 1097 bp, Zea mays
  misc_feature: Ceres CLONE ID no. 1501937
  misc_feature: Ceres CDNA ID no. 25446776
  CDS (143)..(985): REFERENCED BY SEQ ID NO: 9256
actgtaagccctgccttcctctgctttcctctcgcaaattttagtcccgcggtgctgctctgttcattactccggcgatcggcgatcagttgtgcacctgccgtagctgttgattgatagcgggccgattgaagtagctgccatgtcgggaatatcgcttgcagtggcgccgcggtctgacccggacaacggggcggagcggcagccgtcgtcggcgatgctcgggggcgtcatgggctcgctccgcgtcatcgagctccagctcgtcgccttcatcatggtcttctcgatgtcaggcctcgtcccgctcatcgacctcgccttcccggtcgtcaccaccctctacctcctcgccctctcccggctcgccttcccttcgctccacagcaagctcgacgacgaagccgccgccgcccactccgccgcgtcccaggagatcttccgcggaagcaagctgtttcaggtgtatgtggtgatgggcaccacggtggggctgttcctgccgctggcgcacgtcctgggcgggttcgcgcgcggcgacgatgccgccgtgcgctccgcgacgccacacctgttcctgctctcgtgccagatcctcacggagaacatcgtcggctcgctcggcgtcttctcgccgccgctgagggcgctggtgccgcttctctacaccgtgcggcgcgtcttcgtcatcgtcgactgggtctacgacgtgtggaccaacaagctcatcacccgcagcgcccccgttcaggataaggcctgggtgtggttcggcaggtacctcgcagtggcgaacctggtctacttctccatcaacctgttcgtcttcctgatccccaagttcctcccccgcgcgttcgagaagtatttccacacgcgcgacgaggtgtacgccaagacggcggaggacaagcgggcgagggatctgtcctcgctcgatgatgacggtgcggcaaaatcggaagtctccaagaaggccgactgagatcgatgatcgtgttcgttgcgccgcgtttgagctgcgctcgtagtgtgctctgtagcttcaactttgcctacctgtatgtggaccggtgtttgcaaaaaaaaaaaaaaaa

SEQ ID NO: 9256 - protein, 280 aa, Zea mays
  misc_feature: Ceres CLONE ID no. 1501937
  misc_feature: Ceres CDNA ID no. 25446776
  misc_feature: Homolog of GI Number: 50923831 NR Desc: OSJNBa0044M19.10
  misc_feature: Homolog of GI Number: 19699160 NR Desc: AT5g52420/K24M7_17
  misc_feature: Homolog of GI Number: 11359723 NR Desc: proteophosphoglycan
  misc_feature: Homolog of GI Number: 72547018 NR Desc: proteophosphoglycan ppg3
  misc_feature: Homolog of GI Number: 13592175 NR Desc: ppg3
  misc_feature: Homolog of GI Number: 34809534 NR Desc: Epa4p
  misc_feature: Homolog of GI Number: 5420387 NR Desc: proteophosphoglycan
  misc_feature: Homolog of GI Number: 67987177 NR Desc: 4Fe
  misc_feature: Homolog of GI Number: 34809533 NR Desc: Epa5p
MSGISLAVAPRSDPDNGAERQPSSAMLGGVMGSLRVIELQLVAFIMVFSMSGLVPLIDLAFPVVTTLYLLALSRLAFPSLHSKLDDEAAAAHSAASQEIFRGSKLFQVYVVMGTTVGLFLPLAHVLGGFARGDDAAVRSATPHLFLLSCQILTENIVGSLGVFSPPLRALVPLLYTVRRVFVIVDWVYDVWTNKLITRSAPVQDKAWVWFGRYLAVANLVYFSINLFVFLIPKFLPRAFEKYFHTRDEVYAKTAEDKRARDLSSLDDDGAAKSEVSKKAD

SEQ ID NO: 9257 - DNA, 632 bp, Zea mays
  misc_feature: Ceres CLONE ID no. 1501988
  misc_feature: Ceres CDNA ID no. 40352005
  CDS (1)..(426): REFERENCED BY SEQ ID NO: 9258
acatcacaacgattagcaagcggagtagcggaccatcaatttctagcgcatcgatccatccatcaaacttcgaacacaagcattctatctgacagctctagcggaggctggttcagtaacaacaatggcgttcgtgccgatctgcgtgcagtgcgggacaagaagcaacccgtgccggtgcaaggtggtcggcccgacgctgggattcgtggcgctcgtcgtggccggggtggtggagtggccgctgggcgccgccgtgtaccttttccgccaccgcaagggccgccgcatcatgggtcacccggccagggtcgtgtaccctcgcgtcaccggcgcaatccccatctaatcgaccgcagcatcttcctcttcggtggtgatctgtcacgaggtaccgccgttggcttgtcaagctgtgtcatgtaatctgggaggttcgtctctccgactctcagcgtgtgtttaataaagcgaggtttttgttgtcgcagtatttgcaaggcttcgccgtggctgtacctactatttgttcgtcgatgtgaagtagagtagctgttttggtcaccccgagtgctgtgtaatagtatcgatcaacttgactcctcttttcggaaataaaaaaaaaaaaaaaa

SEQ ID NO: 9258 - protein, 74 aa, Zea mays; identical to SEQ ID NO: 8836
  misc_feature: Ceres CLONE ID no. 1501988
  misc_feature: Ceres CDNA ID no. 40352005

SEQ ID NO: 9259 - DNA, 609 bp, Zea mays
  misc_feature: Ceres CLONE ID no. 1502044
  misc_feature: Ceres CDNA ID no. 25446160
  CDS (68)..(406): REFERENCED BY SEQ ID NO: 9260
ccatttgcgccgccgcctcccccgaagccatccgcacccccttccccacgctcgctcgcccgacgcgatggctcccaccaagaaggcgaagaagagcggggagaacatcaacaacaagctgcagctggtgatgaagagcggcaagtacacgctcggctacaagaccgtcctcaagacgctgcgcagctccaaggggaagctgatcatcctcgcgaacaactgccctccccttaggaagtcagagattgagtactacgctatgttggcgaaaattagcgtgcaccacttccacggaaacaatgttgatcttggaactgcctgcggcaagtactaccgggtgtgctgcctcagcatccttgaccctggtgactcggacatcatcagcaccaccaccaccacccagtgaagagaagagagctttctacctattttatttagtcgagttgtagggtcctgttgtgctcttggaaccactcttgttatcttcggtttgtgtacctttttgcgacgctgagttggagctgtcatacagataatacttcatatggttgttctgctggacattcatgtggttttgttttcatgatatcgttaaaaaaaaaaaaaaaa

SEQ ID NO: 9260 - protein, 112 aa, Zea mays; identical to SEQ ID NO: 2948
  misc_feature: Ceres CLONE ID no. 1502044
  misc_feature: Ceres CDNA ID no. 25446160
  misc_feature (12)..(106): Pfam Name: Ribosomal_L7Ae PFAM Desc: Ribosomal protein L7Ae/L30e/S12e/Gadd45 family
  misc_feature: Homolog of GI Number: 57471710 NR Desc: ribosomal protein L30
  misc_feature: Homolog of GI Number: 50511371 NR Desc: putative 60S ribosomal protein L30
  misc_feature: Homolog of GI Number: 71042078 NR Desc: Chain C
  misc_feature: Homolog of GI Number: 2668750 NR Desc: ribosomal protein L30
  misc_feature: Homolog of GI Number: 55297497 NR Desc: putative ribosomal protein L30
  misc_feature: Homolog of GI Number: 2879811 NR Desc: ribosomal protein L30
  misc_feature: Homolog of GI Number: 34909198 NR Desc: putative 60S ribosomal protein L30
  misc_feature: Homolog of GI Number: 6984132 NR Desc: 60S ribosomal protein L30
  misc_feature: Homolog of GI Number: 21593857 NR Desc: 60S ribosomal protein
  misc_feature: Homolog of GI Number: 21280849 NR Desc: putative ribosomal protein L30

SEQ ID NO: 9261 - DNA, 671 bp, Zea mays
  misc_feature: Ceres CLONE ID no. 1502051
  misc_feature: Ceres CDNA ID no. 40352006
  CDS (131)..(433): REFERENCED BY SEQ ID NO: 9262
ctacgcgagagtgttccttcctgagcttgcggcggcagaggttctcgatttctagggcaaactcctcgctcgggttccccctcggtccgcgcgctcgaggcgagagcaggtcgtcggaggagcatccgggatggcggggcgcaaggagacggcgctcgacctggccaagttcgtcgacaagggcgtccaggtcaagctcaccggcggccgccaagttacaggaaccttgaagggatatgaccagctgctcaacttagtgctggatgaagcagtcgagtctgaaagagagcaagatgacccgttgaagctgtcaaccaagaccagacaacttggtctcattgtgtgcagaggcactgctgtcatgctggtgtcaccaactgatggaaccgacgagattgccaaccccttcctcgcagcggagggggcgtcataagctttatactgggcaattgggtcagagctgtattactcaagcatgtgccgaaagagcttctgttcttttggaaaaaactaattgtacccgtgtttgacatgtgctgatgaacttgtaatttgtatcgagctgcttaaaacatccttccatagcagccatggttgcatgtatcttcattgctggagaaaaaaaaaaaaaaaaaaaaaaaaaaaaaaaaaaaataaaaaaaaaaaaaaaa

SEQ ID NO: 9262 - protein, 100 aa, Zea mays; identical to SEQ ID NO: 4228
  misc_feature: Ceres CLONE ID no. 1502051
  misc_feature: Ceres CDNA ID no. 40352006
  misc_feature: The plant flowers significantly late compared to wild-type.
  misc_feature: The plant senesces significantly late copared to wild-type.
  misc_feature: Useful for making plants with modulated flowering time
  misc_feature: Useful for making plants with modulated time to senescence
  misc_feature (9)..(82): Pfam Name: LSM PFAM Desc: LSM domain

SEQ ID NO: 9263 - DNA, 621 bp, Zea mays
  misc_feature: Ceres CLONE ID no. 1502085
  misc_feature: Ceres CDNA ID no. 40352007
  CDS (132)..(284): REFERENCED BY SEQ ID NO: 9264
gtagtggcagcgagccagcgacctcgagtagcagcagaggctccgcaggggcgaaaaggtgtgaagcttccttcggagatcccagtagcagaagcaacgcaggcatcggcttgcgacaggagaggacggagatgacgcagaagcagaccctgttcaaggggcagagcaagaagaagactatccctcccaaccgccacggcaaggcgcctcatgttcgtaaaggaaagagagccgtcaagcccaccaagttcacaaaggacatggacgccgagaaggtatcctagagtgtagttaagcgtagaattagcaaacgcctgtgtctatcagcacttcttcctttgcgatataagattaagattattcgaggtatttgctctggttcagtgaaactgggtgtttggatgattcggtttaattgtgtgtgttttagctaccctagctgttgaatgggactaggaaggttgtcagctcaattctggttgccacgaccctgtttcctatcaattagcatattttgtcgttgattctttaagattgtaccaattttgaatcgtcctttaagagaatataagagggtactaaatttcaaaaaaaaaaaaaaaaagaaaaaaaaaaaaaaaa

SEQ ID NO: 9264 - protein, 50 aa, Zea mays
  misc_feature: Ceres CLONE ID no. 1502085
  misc_feature: Ceres CDNA ID no. 40352007
MTQKQTLFKGQSKKKTIPPNRHGKAPHVRKGKRAVKPTKFTKDMDAEKVS

SEQ ID NO: 9265 - DNA, 624 bp, Zea mays
  misc_feature: Ceres CLONE ID no. 1502309
  misc_feature: Ceres CDNA ID no. 40041441
  CDS (3)..(368): REFERENCED BY SEQ ID NO: 9266
aagacgaggaagaggttcccggtcccggcgccgccactatgtcgtcgatgatgaacgcgctgtcaaactggctggtgaacccgcgccgcaacccgctcgcgcgcctccacatgcacaccgtctcctcgcgcctcaggaaatacgggctgaggtacgatgacctgtacgacccctacttcgacctggacatcaaggaggcgctcgggaggctgcctagggaggtggtcgacgcctgcatccagcgcctcaagcgcgccatggacctctccatgaagcatcagtacctccccgaggacctccaggttcgtgccccttcatttcccccgatctgggtctctcagttcgtattacggtcgtggtcgttgtgacggcagcgtccgaggttgcgtaagataggttctatgtcgaaaactaatcctgacgtgattcattatcggtgtaaagttgcggatgattgcatgtcaagtgagatgtgtccgctgatgtgtttgggttgtacctgtgattcgagaattttgcaaccatggcactcccttcggcgggcttcagattattggcaccgcgatcgtcgcaattgaatctgtggcattataatctcgcccgttttgaaaaaaaaaaaaaaaa

SEQ ID NO: 9266 - protein, 109 aa, Zea mays
  misc_feature: Ceres CLONE ID no. 1502309
  misc_feature: Ceres CDNA ID no. 40041441
  misc_feature (11)..(108): Pfam Name: UCR_14kD PFAM Desc: Ubiquinol
  misc_feature: Homolog of GI Number: 50919263 NR Desc: putative ubiquinol
  misc_feature: Homolog of GI Number: 633681 NR Desc: ubiquinol
  misc_feature: Homolog of GI Number: 15239430 NR Desc: ubiquinol
  misc_feature: Homolog of GI Number: 12642870 NR Desc: putative ubiquinol
  misc_feature: Homolog of GI Number: 30689398 NR Desc: ubiquinol
MSSMMNALSNWLVNPRRNPLARLHMHTVSSRLRKYGLRYDDLYDPYFDLDIKEALGRLPREVVDACIQRLKRAMDLSMKHQYLPEDLQVRAPSFPPIWVSQFVLRSWSL

SEQ ID NO: 9267 - DNA, 751 bp, Zea mays
  misc_feature: Ceres CLONE ID no. 1502362
  misc_feature: Ceres CDNA ID no. 40352008
  CDS (64)..(564): REFERENCED BY SEQ ID NO: 9268
cttcaaaaaaagaaaaaaccctaaaagaaatcatttgacggcgcctctccccactctacaaccatgccgcctaagttggacccaagccagatcgtcgacgtctacgtccgtgtaaccggaggagaagtcggagccgccagttccctcgctcccaagatcggtcccctcggtctcgcccccaagaagatcggagaagacatcgccaaagagaccgccaaggagtggaaagggctccgcgtcaccgtcaagctaacggttcagaatcgtcaggctaaggtcacggtggttccatctgctgcggcgcttgtcatcaaggccttgaaggagccggagagggaccgcaagaaggtgaagaacatcaagcacaatggtaacatttcgtttgatgatgtgattgagattgctaggatcatgaggcctagatctattgccaaggagcttagtgggactgtgagggagattcttgggacctgtgtctctgttgggtgcactgttgatgggaaggaccccaaggatcttcagcaggagattcaagagggtgagattgatattcctgagaactaagtaaacgaaaaaaatgttgtctttttttgatttatttcaattagaatgactcagttttggatttgttgttgcgttttcttgtttctgtttcaagaaccatgatgagtttatcaatctcagtgtcttgaatctatctttggttgatgatcagaatgtatgattgatttggtcaaaaaaaaaaaaaaaa

SEQ ID NO: 9268 - protein, 166 aa, Zea mays
  misc_feature: Ceres CLONE ID no. 1502362
  misc_feature: Ceres CDNA ID no. 40352008
  misc_feature (12)..(71): Pfam Name: Ribosomal_L11_N PFAM Desc: Ribosomal protein L11
  misc_feature (76)..(144): Pfam Name: Ribosomal_L11 PFAM Desc: Ribosomal protein L11
MPPKLDPSQIVDVYVRVTGGEVGAASSLAPKIGPLGLAPKKIGEDIAKETAKEWKGLRVTVKLTVQNRQAKVTVVPSAAALVIKALKEPERDRKKVKNIKHNGNISFDDVIEIARIMRPRSIAKELSGTVREILGTCVSVGCTVDGKDPKDLQQEIQEGEIDIPEN

SEQ ID NO: 9269 - DNA, 737 bp, Zea mays
  misc_feature: Ceres CLONE ID no. 1502381
  misc_feature: Ceres CDNA ID no. 25446161
  CDS (2)..(454): REFERENCED BY SEQ ID NO: 9270
gaggcggaagcagaactgggaaggggagaagattccgatggggactaagaaacagggaggaggcggaggagaccagaaggtcctcctctggaggctgccggaggtcacctctaaggagctcggcaagataggccccgccctcggaatcggcatcggctgcggcgccggcgcaggcatcggattcttcggtggtgcagggttaggctatggatttcctggactcacattaggctttggagttggagctggatgtggtgtgggaattggctttggttatgggttgggcaaaggaattgcatatgatgaaaagaaaaaatactccaatgttggcaagatgttccaggaagctccacattttcctatggacactgtcggtgctttatttgacgagctggttataaacaccaagaagcttgtgacatcaacatcaaaaggaatcgaaaaatggcgttgagcggcagcactgcattgttgtctctataatcgccttgaattgtatcaacggagattgcgagcagcagttatcttgaacaggcaggacctggccctagaatgcagcctgttgcatgtcgtgactttctttctattgttcgtcagctagtagctttgtatttaggtaggatcctgagataatacatattatttctggtcgatatttattagttgcattgaactgtattctgggttgctcatcacttatatgttaaattggaggaaaattaaaaaaaaaaaaaaaa

SEQ ID NO: 9270 - protein, 138 aa, Zea mays; identical to SEQ ID NO: 9074
  misc_feature: Ceres CLONE ID no. 1502381
  misc_feature: Ceres CDNA ID no. 25446161
  misc_feature: Homolog of GI Number: 50509489 NR Desc: glycine
  misc_feature: Homolog of GI Number: 765323 NR Desc: silk fibroin heavy chain
  misc_feature: Homolog of GI Number: 58380709 NR Desc: ENSANGP00000007494
  misc_feature: Homolog of GI Number: 47007909 NR Desc: major ampullate spidroin 3

SEQ ID NO: 9271 - DNA, 746 bp, Zea mays
  misc_feature: Ceres CLONE ID no. 1502397
  misc_feature: Ceres CDNA ID no. 25445581
  CDS (323)..(529): REFERENCED BY SEQ ID NO: 9272
gagattagtatcggtgaccactgaccaccagtgaagtctgtctgcccacatccgagcgcgaccctggccccggcccgtctcgcctgaccgccgccacgccgacggctgaccagcacgcgggcccagcaccccccgacctcgtcctcaccggctcaccctgaccgccgccgcccaccactcacctcgcctccccaacttctgccagctcgcatcccgccgcaagaaacgcccgtgccgccgctgccctagcccctaggccagcgcccaggtcccctcttcttctcgcccttcgccagcgacgagcccccaataggtctgaaggatgagaaaggggctgcatcctcagatgcaatggatctcatatgtgacgcagagtggtaggctgatcaatatcatgatgaccaaggtgaaccatacaggcaaagtgtaccacatgagggccaagcgacagatggctcaaagcctcggccagatcgcaaagttcaaacgtcgatacgagcaggaagcagtggaaagcaaggacaagtagttgagacggagctatggcctctgtaacctaagtcggttctgttgactgcacagttttcagctaaggacatgattttattttagatcacatcatcttttgttccacttcagaattgggtttgtaccccgtcgttagcaaactatggcacttgttccatcgtaaagccccaagaaaatagtctattgattgcttttttttctcaaaaaaaaaaaaaaaa

SEQ ID NO: 9272 - protein, 68 aa, Zea mays
  misc_feature: Ceres CLONE ID no. 1502397
  misc_feature: Ceres CDNA ID no. 25445581
MRKGLHPQMQWISYVTQSGRLINIMMTKVNHTGKVYHMRAKRQMAQSLGQIAKFKRRYEQEAVESKDK

SEQ ID NO: 9273 - DNA, 652 bp, Zea mays
  misc_feature: Ceres CLONE ID no. 1502422
  misc_feature: Ceres CDNA ID no. 25446162
  CDS (143)..(352): REFERENCED BY SEQ ID NO: 9274
agtctagtctctcctccgcagatccataaaccactccacactccccctctcctagtctcctctccacactcccgctctcctgctactctgctccgtgatctggtctggtgagatcggggatcggaccgtcgactcgacaaacatggcggactggggccccgtggtggtgggcgtggtgctgttcgtgctgctctcgccgggcctgctctgcgagctgccgggcacccaccgccacgtcgacttcggcggcttccacaccaacggcaaggccatcttcgtccacaccctcgtcttcttcgccgccttcaccatcctcacgctcgcgctccacatccacatctacaccggctagctagctagtgcggagcatatgttgcgtcggtctggactcgcggaggtctcagatcagaaaggaacgccggccggcggcgcgtcctgtgttgctgctcttgttcctctgcagttcgatcgattcgaccaagtgcttgtaactgcctagcttcctcgttgctatgctagttactctctgctatctatcatgtaaaggccgccatggtcgtccatctgtagctgggcttgcagcaacaggaactagtgcgtgccctttaattaatggaatctgttcgttggttgcttaaaaaaaaaaaaaaaa

SEQ ID NO: 9274 - protein, 69 aa, Zea mays
  misc_feature: Ceres CLONE ID no. 1502422
  misc_feature: Ceres CDNA ID no. 25446162
  misc_feature: Homolog of GI Number: 50923847 NR Desc: OSJNBa0044M19.18
  misc_feature: Homolog of GI Number: 50923841 NR Desc: OSJNBa0044M19.15
  misc_feature: Homolog of GI Number: 1532167 NR Desc: localized according to blastn similarity to EST sequences
MADWGPVVVGVVLFVLLSPGLLCELPGTHRHVDFGGFHTNGKAIFVHTLVFFAAFTILTLALHIHIYTG

SEQ ID NO: 9275 - DNA, 866 bp, Zea mays
  misc_feature: Ceres CLONE ID no. 1503182
  misc_feature: Ceres CDNA ID no. 25446621
  CDS (98)..(733): REFERENCED BY SEQ ID NO: 9276
atcctctccggcacgagccgtccagttcagttcacctcggtccgggaccgcgactacaccgacggcggcgcgtccgagcccagccgacgccgagccaatggtgactccagcgacattctccctccgccccagcgcgccccccgcgccgcctcgtgccgggctgccccgcgctcgggcctgtttcgcgcccgccatccgcacctccccttccgtcgccttttcctaccagcctcggcgcttcagtggcatccgccgcgccgtggccgtcgactccgagcagggctcccccgagtctccagagcaggagaagaagcccaagacgtactacttcctggtggcaaacgccaagttcatgctggacgaggaggagcatttccaggagcaactcgccgagaagctgcgcaactacgccgagcgcgacaaggagcaggacttctggctcgtcgtggagcccaagttcctcgacaggttccccaacatcaccaagcgcctcaagcgccccgccgtcgcgcttgtctccaccgacggcaactggatcacattcatgaagttaaggctagacagggtcttacaagaccagttcgacgcagaatcagttgaagaggcattggcttctaaccctgttgagttgaaatttgagaagcctgagaaatggacagctccgtaccctaaatatgggtttggatggtgggaacccttcttgcctccaaagttcagcaatggtacggcatagagataagcagcaatccctatgaggcatgtaagattactcccctgtaagtgatgaatgtaattttaattttgatgatgaggatgtagtacttgaggttgtaccagtacagttagttgaaaaaaaaaaaaaaaaa

SEQ ID NO: 9276 - protein, 211 aa, Zea mays
  misc_feature: Ceres CLONE ID no. 1503182
  misc_feature: Ceres CDNA ID no. 25446621
  misc_feature: Homolog of GI Number: 46359839 NR Desc: At5g58250
  misc_feature: Homolog of GI Number: 66554042 NR Desc:  similar to largest subunit of the RNA polymerase II complex
  misc_feature: Homolog of GI Number: 133323 NR Desc: DNA
  misc_feature: Homolog of GI Number: 4096110 NR Desc: RNA polymerase II largest subunit
  misc_feature: Homolog of GI Number: 5420387 NR Desc: proteophosphoglycan
  misc_feature: Homolog of GI Number: 6677795 NR Desc: polymerase
  misc_feature: Homolog of GI Number: 4505939 NR Desc: DNA directed RNA polymerase II polypeptide A
  misc_feature: Homolog of GI Number: 133327 NR Desc: DNA
  misc_feature: Homolog of GI Number: 2145091 NR Desc: RNA polymerase II largest subunit
MVTPATFSLRPSAPPAPPRAGLPRARACFAPAIRTSPSVAFSYQPRRFSGIRRAVAVDSEQGSPESPEQEKKPKTYYFLVANAKFMLDEEEHFQEQLAEKLRNYAERDKEQDFWLVVEPKFLDRFPNITKRLKRPAVALVSTDGNWITFMKLRLDRVLQDQFDAESVEEALASNPVELKFEKPEKWTAPYPKYGFGWWEPFLPPKFSNGTA

SEQ ID NO: 9277 - DNA, 1220 bp, Glycine max
  misc_feature: Ceres CLONE ID no. 1503796
  misc_feature: Ceres CDNA ID no. 35383441
  CDS (2)..(1075): REFERENCED BY SEQ ID NO: 9278
ctcatctctagcctgcgccgccgcctccaccgcaccccccaaaaccctagcgctcgcttcgccccgccccaccaccatggccggcgcgcaggagtccctcgtctacgccggtgtgatgcgcggccacaacgacgtggtcacggccatcgcgacgcccatcgacaactcgcccttcatcgtctcctcttcccgcgacaagtcgctgctcgtctgggacctcaccaaccccatccaggccacccaggactccagctccgagtacggcgtccccttccgccgcctcaccggccacggccactttgtccaggacgtcgtcctcagctccgacggccagttcgcgctctccggatcctgggacggcgagctccgcctctgggacctctccaccggggtcaccacccgccgcttcgtcggccacgagaaggacgtcctctccgtcgccttctccattgacaaccgacagatcgtctccgcgtcccgcgaccgcaccatcaagctgtggaacaccctcggtgagtgcaagtacaccatcggcggtgaccttggaggcggcgagggccacaccggctgggtgtcctgcgtccgtttctcgcccaacaacttcgccccgaccatcgtctcgggctcatgggaccgctccgtcaaggtctggaaccttaccaactgcaagctccgctgcactcttgatggtcatggtggctatgttagcgccgttgcagtcagcccagacggttcgctttgcgcgtctggtggcaaggatggcgtcaccttgctgtgggatttgaccgagggcaagagactctactcgctggatgcgggatccattatcaactcactatgcttctcgcccaaccgctactggctctgcgcggcgacacaggattccatcaagatctgggatcttgagtcaaagcacatcgtgcaggaccttaggcccgaggtccctgtctccaccaagcagatgctctactgcacttgcttgagctggagcgcggatggcagcactctgtacgctggttacaccgatggaactatccgcatctacaagatctcggggttcagctactctagctagattatgtatcttgttttagtggcctctgttctggtaaaacggctgtggtatcttcttttttttgactgtcttgaggcgtaatatctgccttggtacttctgcttaatttactatctgtgtcttagccacaaaaaaaaaaaaaaaa

SEQ ID NO: 9278 - protein, 332 aa, Glycine max
  misc_feature: Ceres CLONE ID no. 1503796
  misc_feature: Ceres CDNA ID no. 35383441
  misc_feature (240)..(275): Pfam Name: WD40 PFAM Desc: WD domain
  misc_feature: Homolog of GI Number: 34911282 NR Desc: guanine nucleotide
  misc_feature: Homolog of GI Number: 50932677 NR Desc: putative guanine nucleotide
  misc_feature: Homolog of GI Number: 1749825 NR Desc: G protein beta
  misc_feature: Homolog of GI Number: 4589836 NR Desc: LeArcA2 protein
  misc_feature: Homolog of GI Number: 4589834 NR Desc: LeArcA1 protein
  misc_feature: Homolog of GI Number: 82621178 NR Desc: ArcA2 protein
  misc_feature: Homolog of GI Number: 17104603 NR Desc: putative WD
  misc_feature: Homolog of GI Number: 2385376 NR Desc: G protein beta subunit
  misc_feature: Homolog of GI Number: 2289095 NR Desc: WD
  misc_feature: Homolog of GI Number: 1346110 NR Desc: Guanine nucleotide
MAGAQESLVYAGVMRGHNDVVTAIATPIDNSPFIVSSSRDKSLLVWDLTNPIQATQDSSSEYGVPFRRLTGHGHFVQDVVLSSDGQFALSGSWDGELRLWDLSTGVTTRRFVGHEKDVLSVAFSIDNRQIVSASRDRTIKLWNTLGECKYTIGGDLGGGEGHTGWVSCVRFSPNNFAPTIVSGSWDRSVKVWNLTNCKLRCTLDGHGGYVSAVAVSPDGSLCASGGKDGVTLLWDLTEGKRLYSLDAGSIINSLCFSPNRYWLCAATQDSIKIWDLESKHIVQDLRPEVPVSTKQMLYCTCLSWSADGSTLYAGYTDGTIRIYKISGFSYSS

SEQ ID NO: 9279 - DNA, 911 bp, Glycine max
  misc_feature: Ceres CLONE ID no. 1504152
  misc_feature: Ceres CDNA ID no. 35383442
  CDS (37)..(666): REFERENCED BY SEQ ID NO: 9280
aaaaacccccaaaatatctctcgctctgaaaccggcatggatttgcagcagagcgagttcgatcgcctcttgttcttcgagcacgctcgcaaggccgcagaagctgaatacgagaagaaccctctcgatgccgataacttaacaagatggggtggagctctattagagttgtctcagtttcagagttttcctgaatcgaagaaaatgacccaagaggctgtttcgaagctagaggaggcgcttgcagtgaatcccaagaagcatgacactctttggtgcctgggaaacgctcacacttcgcaagcgtttttaattccggaccaggaggaggcaaaggtttattttgataaggcagctgtgtactttcagcaagctgttgatgaggatccttcaaatgaactttaccgcaaatcattggaagtggctgctaaggctcctgagctgcatgtagaaatccataagcagggatttggtcagcagcagcaggcggcagcaacagctggatcttctacttctgcttcgggtacaaagactcagaagaaaaagaagagcagtgatctgaagtatgacatatttggatggataattctggcagtcggcattgttgcatgggtgggatttgcaaaatcaaacctgccaccgcctcccccttcccctcctcgataagtgaagccatttgatttgatctcacacattattgattattgagaatgatatttgatttcggttagtgtcgtttatttagtttgacagtagtaatgtttgtcatggtgtagccgttggcttatcttatccatcatacaaaattttcttactgtgggctgagcagttaaaaatgtccggcttagatggttgctagtatttgcaaaatcaaaagcattgccaatttgccatcaaaaaaaaaaaaaaaa

SEQ ID NO: 9280 - protein, 209 aa, Glycine max
  misc_feature: Ceres CLONE ID no. 1504152
  misc_feature: Ceres CDNA ID no. 35383442
  misc_feature (8)..(206): Pfam Name: TOM20_plant PFAM Desc: Plant specific mitochondrial import receptor subunit TOM20
  misc_feature: Homolog of GI Number: 1524370 NR Desc: TOM20
  misc_feature: Homolog of GI Number: 21592649 NR Desc: putative TOM20
  misc_feature: Homolog of GI Number: 19310823 NR Desc: putative TOM20 protein
  misc_feature: Homolog of GI Number: 9802543 NR Desc: F17L21.18
  misc_feature: Homolog of GI Number: 30689902 NR Desc: mitochondrial import receptor subunit TOM20
  misc_feature: Homolog of GI Number: 11044961 NR Desc: TOM20
  misc_feature: Homolog of GI Number: 57899435 NR Desc: putative TOM20
  misc_feature: Homolog of GI Number: 22655340 NR Desc: At5g40930/MMG1_2
  misc_feature: Homolog of GI Number: 9279630 NR Desc: TOM20
  misc_feature: Homolog of GI Number: 83753857 NR Desc: Chain A
MDLQQSEFDRLLFFEHARKAAEAEYEKNPLDADNLTRWGGALLELSQFQSFPESKKMTQEAVSKLEEALAVNPKKHDTLWCLGNAHTSQAFLIPDQEEAKVYFDKAAVYFQQAVDEDPSNELYRKSLEVAAKAPELHVEIHKQGFGQQQQAAATAGSSTSASGTKTQKKKKSSDLKYDIFGWIILAVGIVAWVGFAKSNLPPPPPSPPR

SEQ ID NO: 9281 - DNA, 1039 bp, Glycine max
  misc_feature: Ceres CLONE ID no. 1504498
  misc_feature: Ceres CDNA ID no. 25446163
  CDS (264)..(920): REFERENCED BY SEQ ID NO: 9282
aaaaccaacaccatccgcggcgaccccttcttcccttccctgagacacttctccccaaagcgaaccaacccagctgaaaagaagcgagacgcgccgcaccgcgttgcctttgtatcgtgcctctatttagctcaagagggagaggataggagaggcgcgcgggaaggggaaggagataaaatcagatcaaatcgtaggaaaccatcggttgatcgagcagcggcggcggcgcagaagcagcaggaagcaggaggggaggggggatggcggtggcgtatcgcgcggaggaggagtacgactacctgttcaaggtggtgctgatcggggacagcggcgtgggcaagtccaacctgctgtcgcgcttcgccagggacgagttcagcctcgacaccaggtccaccatcggcgtcgagttcgccaccaagaccgtccgcgtcgacggcaagctcgtcaaggcgcagatctgggacaccgccggccaagaaaggtaccgggccatcaccagcgcgtactaccggggcgccgtgggcgcgctcgtggtgtacgacgtgacgcgccacatcacgttcgagaacgcggagcggtggctgacggagctccgcgaccacacggacgccaacatcgtggtgatgctggtcgggaacaaggcggacctgcgccacctgagggccgtctcgcccgaggaggccagggccttcgcggagcgccaccgcaccttctctatggagacgtccgcgctggaggccaccaacgtggaggatgccttcacggaggtgctcggcgagatctaccgcgtcgtcagcaagaaggccctcgacattggcgacgaccccgccgcgccgcccaggggcaagaccatcgacgttggtggcaaggacgacgtcaccccagtgaacacgggtggctgctgctcggcctagtcaaactctctctctgccggagacggtggtaggtgatgccgtgtgtgtgcgtgctagggtgtaacaggcatgttgcgaccgtgatgattactgattattggtcaaaaaaaaaaaaaaaa

SEQ ID NO: 9282 - protein, 218 aa, Glycine max
  misc_feature: Ceres CLONE ID no. 1504498
  misc_feature: Ceres CDNA ID no. 25446163
  misc_feature (16)..(177): Pfam Name: Ras PFAM Desc: Ras family
  misc_feature: Homolog of GI Number: 34910940 NR Desc: putative GTP
  misc_feature: Homolog of GI Number: 50899518 NR Desc: putative GTP
  misc_feature: Homolog of GI Number: 51243763 NR Desc: rab GTP
  misc_feature: Homolog of GI Number: 50511479 NR Desc: putative GTP
  misc_feature: Homolog of GI Number: 28950757 NR Desc: At5g60860
  misc_feature: Homolog of GI Number: 303742 NR Desc: GTP
  misc_feature: Homolog of GI Number: 3024504 NR Desc: Ras
  misc_feature: Homolog of GI Number: 6560749 NR Desc: F3M18.2
  misc_feature: Homolog of GI Number: 28973321 NR Desc: putative Ras family GTP
  misc_feature: Homolog of GI Number: 452357 NR Desc: guanine nucleotide regulatory protein
MAVAYRAEEEYDYLFKVVLIGDSGVGKSNLLSRFARDEFSLDTRSTIGVEFATKTVRVDGKLVKAQIWDTAGQERYRAITSAYYRGAVGALVVYDVTRHITFENAERWLTELRDHTDANIVVMLVGNKADLRHLRAVSPEEARAFAERHRTFSMETSALEATNVEDAFTEVLGEIYRVVSKKALDIGDDPAAPPRGKTIDVGGKDDVTPVNTGGCCSA

SEQ ID NO: 9283 - DNA, 692 bp, Zea mays
  misc_feature: Ceres CLONE ID no. 1505095
  misc_feature: Ceres CDNA ID no. 25446164
  CDS (2)..(187): REFERENCED BY SEQ ID NO: 9284
aatcgagccccagaggaacgactcctgccggacgccgccacaccatctgaaactgacggcggcgggcggccgctgcttcctctcccttctccgttcagatccggctactggcgtccctcctccgccatcttccctacccccgacgtggcgacgagctgtgagccgtgagctgttccaacattcctgaggtcatctccgtcatcaccaacgatggccgcaacatcgtgggtacgctcaggggattcgatcaggccaccaacattatactcgacgagtcccatgagagggtctattctagaaaggagggagtccaacaacttgttcttggtctgtacattatcaggggtgacaacataagcgttgtgggcgaggttgatgaagagctggattcaagattggatatgtcgaagctaagggcgcacccactgaagcctgttattcactgaggtccgagtatgtctttgggtaatatgtggactggatggatgggtcactgttgaatgcaggatgtagcatcatcatggtgaggggactgagtaatatggacatgtatcttgcgtattgtgcaatgaatgtgttggctgttgggtcgcttgcctacgcattctgtaagattgcagttaccattaggaactgaactcaactcgactgaattaatatcatttggctctactcgaaaaaaaaaaaaaaaa

SEQ ID NO: 9284 - protein, 51 aa, Zea mays
  misc_feature: Ceres CLONE ID no. 1505095
  misc_feature: Ceres CDNA ID no. 25446164
  misc_feature: Homolog of GI Number: 25404943 NR Desc: protein F1E22.8
  misc_feature: Homolog of GI Number: 21592627 NR Desc: small nuclear ribonucleoprotein
  misc_feature: Homolog of GI Number: 66533783 NR Desc:  similar to CG2021
  misc_feature: Homolog of GI Number: 68358714 NR Desc:  similar to U6 snRNA
  misc_feature: Homolog of GI Number: 31240533 NR Desc: ENSANGP00000020162
  misc_feature: Homolog of GI Number: 50728156 NR Desc:  similar to U6 snRNA
  misc_feature: Homolog of GI Number: 57100503 NR Desc:  similar to U6 snRNA
  misc_feature: Homolog of GI Number: 24655606 NR Desc: CG2021
  misc_feature: Homolog of GI Number: 54641159 NR Desc: GA15189
  misc_feature: Homolog of GI Number: 46329906 NR Desc: MGC82379 protein
MDGSLLNAGCSIIMVRGLSNMDMYLAYCAMNVLAVGSLAYAFCKIAVTIRN

SEQ ID NO: 9285 - DNA, 950 bp, Zea mays
  misc_feature: Ceres CLONE ID no. 1505113
  misc_feature: Ceres CDNA ID no. 40352009
  CDS (44)..(820): REFERENCED BY SEQ ID NO: 9286
gccgtaaactcaaagaagacgaaacaacttcacacaatccacaatgggtcgtgtcatcagagcccaacgtaagggagcaggttccgtcttcaagtctcacactcaccaccgcaagggccccgccaagttcaggagcctcgacttcggcgagagaaatggttacctcaagggtgtcgtcacggagatcatccacgatccgggacgtggtgctccgttggcccgcgtcgccttccgtcatcctttccgctacaagaagcagaaggagctcttcgtcgccgccgaaggtatgtacaccggacagttcttgtactgcggtaagaaggccactctcgttgtcggaaatgtactccctctcagatctatccctgagggagctgttgtctgcaacgttgagcaccatgtcggtgatcgtggtgtgctcgctagagcttctggtgattacgctatcgttatttctcacaaccctgacaacgacacgaccagagttaagttgccgtctggatcgaagaagattgtcccaagtggttgcagggccatgattggtcaagttgctggaggtggaaggactgagaagccaatgctcaaggcgggtaacgcgtaccacaagtaccgtgtgaagagaaactgctggcctaaggttcgtggtgtggctatgaaccctgtggagcatcctcacggaggaggtaaccatcagcatattggtcacgccagtactgttcgtcgtgatgcaccccctgggcaaaaggttggtcttattgctgcaaggagaactggtcgtctcagaggtcaagctgctgctcttgcttccaagcaagaataaggagagaaagcttcaagatgatgaaattgttcacttttgtttttgggtttttgctgagaccttgttttgaaaccttaagacttgctataatgttatttgagacctttctctatcaaaaaaaaaaaaaaaa

SEQ ID NO: 9286 - protein, 258 aa, Zea mays
  misc_feature: Ceres CLONE ID no. 1505113
  misc_feature: Ceres CDNA ID no. 40352009
  misc_feature (11)..(90): Pfam Name: Ribosomal_L2 PFAM Desc: Ribosomal Proteins L2
  misc_feature (96)..(231): Pfam Name: Ribosomal_L2_C PFAM Desc: Ribosomal Proteins L2
MGRVIRAQRKGAGSVFKSHTHHRKGPAKFRSLDFGERNGYLKGVVTEIIHDPGRGAPLARVAFRHPFRYKKQKELFVAAEGMYTGQFLYCGKKATLVVGNVLPLRSIPEGAVVCNVEHHVGDRGVLARASGDYAIVISHNPDNDTTRVKLPSGSKKIVPSGCRAMIGQVAGGGRTEKPMLKAGNAYHKYRVKRNCWPKVRGVAMNPVEHPHGGGNHQHIGHASTVRRDAPPGQKVGLIAARRTGRLRGQAAALASKQE

SEQ ID NO: 9287 - DNA, 851 bp, Zea mays
  misc_feature: Ceres CLONE ID no. 1505134
  misc_feature: Ceres CDNA ID no. 40352010
  CDS (105)..(578): REFERENCED BY SEQ ID NO: 9288
tccatcacagattccgagagctcccaaggtcgcgccgcggctcccccctcccccaccgcatcccgccggtcgctcgactcgcctcaccgccgccgccggtcgacatggggttcgtgtccttcgccgggagggtcctcttcgcctccgtcttcctcctctccgcctaccaggagtttactgaatttggaactgatggcgggccagctgcaaagaatctgcagccaaagtttaacagtttcaccaaaaatatctccgtacacctcggagtggtggtgcctcatgtagagttgaagcatgtcattgccgctaccattggtctgaagggtctgggaggtctcctgtttatcgtcagcagttcatttggtgcttatctcctggccctctaccttgctttcatcacgcctgttgtctacgacttctacaactacgacatggagaaggctgaattcgtgcagatcttcatgaagttcacacagaacctggcactgtttggagcccttctcttcttcctgggcatgaagaactcggtccccaagaggcaggccaagaagaaggccgccaagtccaagacaacctagagcatctctctctgccaagatagctgtggccgtaggggctttgcgggaaagacggtcttatttaacaaagctaccgtacctgttcttctcttatgtgtaatggatccgtttttgaagggggcgtaggccttacaaggtgtgggtggcggtttaggcgactagattgtgtatcattattatgtgctacttccgatttgattgttgtagggctaaagattgttatcccatttgtttattctgcaaccaatattgttactaaaaaaaaaaaaaaaa

SEQ ID NO: 9288 - protein, 157 aa, Zea mays
  misc_feature: Ceres CLONE ID no. 1505134
  misc_feature: Ceres CDNA ID no. 40352010
  misc_feature (1)..(138): Pfam Name: HR_lesion PFAM Desc: HR
MGFVSFAGRVLFASVFLLSAYQEFTEFGTDGGPAAKNLQPKFNSFTKNISVHLGVVVPHVELKHVIAATIGLKGLGGLLFIVSSSFGAYLLALYLAFITPVVYDFYNYDMEKAEFVQIFMKFTQNLALFGALLFFLGMKNSVPKRQAKKKAAKSKTT

SEQ ID NO: 9289 - DNA, 1269 bp, Zea mays
  misc_feature: Ceres CLONE ID no. 1505137
  misc_feature: Ceres CDNA ID no. 40041442
  CDS (31)..(843): REFERENCED BY SEQ ID NO: 9290
agtgatagtgagcgacgccacgggacaggcatggcgagccgcgagcggcagcacacccgcagctacgactacgactacgagcacctcgtgctcgacccggcgtctctgggcgtgccgtgggccgacccggccgccgtggagatcccgccgcagctcctcgccgcgctcggggagtacctctccggctccgcggcccgcggggacgtcgaggcggaggcggacgacgagttcatgatgcacgagttcaaggtgcggcggtgcgcgcgcgcgcggagccacgactggacggcgtgcccctacgcgcacccgggcgaggccgcgcggcgccgggacccgcgccgcgtcgcctacgcgggggagccgtgcccggacttccggcgccgcccgggcgccgccaccgccgcgtgcccgcgcggggccgcctgcccgctcgcgcacggcaccttcgagctgtggctccacccgtcccgctaccgcacccgcccctgccgcgcgggcgccgcctgccgccgccgcgtctgcttcttcgcgcacgccgcggccgagctccgcgccgccgcgaatcccaaggacgggtgctctccgctctcgctctcgctctcgccaaagtccaccctgcaggcggcgctctgggagtcgccgccggtgtcccccgtggagggccgcaggtgggttgacgagccgtcggaggacgccgacgccgacgccgagatggaggagctgatgctcgcgatgcgggagctcagcttcaggaaggcccaggcgtcgccagcgccggttctgcctgccgtcacagaggacgacgggccggacttggggtgggtgtcggagctggtgatgtaggcgaggcatatgccagcgcctgcccggtgccgacgcccgaaattaatcaaagccaagacgtggacgccgccatctccagaggcgcctctcgccgtttggaacagcttcattaagcaatgtttatttttagcatttccatgaattgcatcattcttctgtggatagaccaaacatggtgcaagtattaatactgcaatctgtaagcgtggcgtgtgtgccccccttctctttttttttccggagaccatggcctcactcaacatgctactgtcgtccatggttttcgttcgatcgtgttactactaccagtaccagtgtacgtctaaccaagtgcagttggcagtgtgtgttccattccatccctgcagctgcagggatcgatgttgcatttgcaaaataggaacccaagcaaaaaaaaaaaaaaaa

SEQ ID NO: 9290 - protein, 270 aa, Zea mays
  misc_feature: Ceres CLONE ID no. 1505137
  misc_feature: Ceres CDNA ID no. 40041442
  misc_feature: Homolog of GI Number: 34909344 NR Desc: OSJNBb0021A09.18
  misc_feature: Homolog of GI Number: 34906436 NR Desc: putative zinc finger transcription factor
  misc_feature: Homolog of GI Number: 50933107 NR Desc: putative zinc finger transcription factor
  misc_feature: Homolog of GI Number: 22136536 NR Desc: At2g25900/F17H15.7
  misc_feature: Homolog of GI Number: 56605376 NR Desc: putative CCCH transcription factor
  misc_feature: Homolog of GI Number: 21593538 NR Desc: putative CCCH
  misc_feature: Homolog of GI Number: 22531114 NR Desc: putative CCCH
  misc_feature: Homolog of GI Number: 60460512 NR Desc: putative CCCH
  misc_feature: Homolog of GI Number: 34899294 NR Desc: zinc finger transcription factor
  misc_feature: Homolog of GI Number: 34899832 NR Desc: CCCH
MASRERQHTRSYDYDYEHLVLDPASLGVPWADPAAVEIPPQLLAALGEYLSGSAARGDVEAEADDEFMMHEFKVRRCARARSHDWTACPYAHPGEAARRRDPRRVAYAGEPCPDFRRRPGAATAACPRGAACPLAHGTFELWLHPSRYRTRPCRAGAACRRRVCFFAHAAAELRAAANPKDGCSPLSLSLSPKSTLQAALWESPPVSPVEGRRWVDEPSEDADADAEMEELMLAMRELSFRKAQASPAPVLPAVTEDDGPDLGWVSELVM

SEQ ID NO: 9291 - DNA, 917 bp, Zea mays
  misc_feature: Ceres CLONE ID no. 1505183
  misc_feature: Ceres CDNA ID no. 25446165
  CDS (2)..(367): REFERENCED BY SEQ ID NO: 9292
agttaagaaccaaagatatgacttcgtatgtcctcctactgctcccttcagatcgacgccgccccctccctcagcctcatcttcagccaccgccgaccccatggcgtgctcgcacaaactccacctccagtgcgcccctctgttctgctccaaccccttctccacgctgatgtctcctcccatggctatcccaaaccctagccgagatcccctcctgtgttggccaccgtctccttcaccaggcgccctccgctatcctcttgctgtcagcacatggcgagctcaccccctatgccagtcgagttcatcacttcccctagagcaacaccttcatccatggtgcccagctgctccttggagcctatgagaattaggtggagaagaaggttaagttcaacgctccttaggtgttcgatgatatgctcgaactggtggccgtcttcgctcttgctaaaattgagtcggagcatgatgtgtgccaaaaaatctaaatacccatatcacagaggctcgtggagttggtgagcaggaccaccaccctccatcacaacctgataatggtacgttaattaatcacgtgatgtggagggcaagagttggattaatctcaaggtgatggtgacgattgaacctgaagatttgacgatctgatcaagtaccaggaggagagatgctcaccaagtggtcgtcttttaacaacactaacgtagtgattattccaggttataattttgttctgttgtggatgatgctaaatgccggtgggctcggccttcttatataagtgtatcccatctttagcttctttattgagaattatcatttaagctagcatttattttaaaacttataaatgtttcatacattcaaattgtaatctttttgaatcaatttcttttgtaaaaaaaaaaaaaaaa

SEQ ID NO: 9292 - protein, 88 aa, Zea mays
  misc_feature: Ceres CLONE ID no. 1505183
  misc_feature: Ceres CDNA ID no. 25446165
MACSHKLHLQCAPLFCSNPFSTLMSPPMAIPNPSRDPLLCWPPSPSPGALRYPLAVSTWRAHPLCQSSSSLPLEQHLHPWCPAAPWSL

SEQ ID NO: 9293 - DNA, 686 bp, Zea mays
  misc_feature: Ceres CLONE ID no. 1505212
  misc_feature: Ceres CDNA ID no. 25446031
  CDS (95)..(514): REFERENCED BY SEQ ID NO: 9294
atctcaaacaccctgcgctcccctcaatctctccaatctctccgctccggcgaccacagcaccagcgcgtccactctccgcccagacccagaagatggcgattgccggcagcgggaggggcaaggcgaagcccgcggccagcgccaagtccgtgtcccggtcttccaaggccggcctccagttccccgtcggccgcgtcgcccggtacctcaaggtcggcaagtacgcgcagcgcgtcggcgccggcgcccccgtctacctcgccgccgtcctcgagtacctcgccgccgagaccctggagctggccgggaacgcggcgcgggacaacaagaagaaccggatcgtgccgcgccacatccagctggcggtgcgcaacgacgaggagctgagcaagctgctgggctcggtcaccatcgccgccggcggggtgctgcccagcatccacagcacgctcctccccaagaaggccggcaagggcaagggcgacatcggctccgcttcccaggagttctagattagattagttttcttgtgaatgtttgggtttggtgcgtcatcgatgttgggtggtggatctggttgggatggattgccgctcgcaatctggttctcgttgttactgcctgtgatttgtcagtgctaatcttcatgaaaccgtagtttgatgcctaaaaaaaaaaaaaaaa

SEQ ID NO: 9294 - protein, 139 aa, Zea mays
  misc_feature: Ceres CLONE ID no. 1505212
  misc_feature: Ceres CDNA ID no. 25446031
  misc_feature (22)..(97): Pfam Name: Histone PFAM Desc: Core histone H2A/H2B/H3/H4
  misc_feature: Homolog of GI Number: 77555982 NR Desc: histone h2a.
  misc_feature: Homolog of GI Number: 3204129 NR Desc: histone H2A
  misc_feature: Homolog of GI Number: 297871 NR Desc: histone H2A
  misc_feature: Homolog of GI Number: 21553797 NR Desc: histone H2A
  misc_feature: Homolog of GI Number: 20334750 NR Desc: At1g08880/F7G19_24
  misc_feature: Homolog of GI Number: 21593507 NR Desc: putative histone H2A
  misc_feature: Homolog of GI Number: 121985 NR Desc: Histone H2A
  misc_feature: Homolog of GI Number: 121981 NR Desc: Histone H2A
  misc_feature: Homolog of GI Number: 1708102 NR Desc: Histone H2A
  misc_feature: Homolog of GI Number: 571481 NR Desc: histone H2A
MAIAGSGRGKAKPAASAKSVSRSSKAGLQFPVGRVARYLKVGKYAQRVGAGAPVYLAAVLEYLAAETLELAGNAARDNKKNRIVPRHIQLAVRNDEELSKLLGSVTIAAGGVLPSIHSTLLPKKAGKGKGDIGSASQEF

SEQ ID NO: 9295 - DNA, 691 bp, Zea mays
  misc_feature: Ceres CLONE ID no. 1505313
  misc_feature: Ceres CDNA ID no. 25892908
  CDS (17)..(466): REFERENCED BY SEQ ID NO: 9296
aaaaaatcaattacccatggcgtcgcttccctctgcgagtttgcttccttctccatcgctcgtggttctatccccgacgaagatcttctcctcgtcctcctcctcgcgctcgattgtgtgctcttcgccccgttcccatagtttctcgtctatcccccgttcgtcgcctagccttcggatgactagaagagcaaatcacaataagcttcaagttgtggctatggctcccgaggaagaaaagctcactcgtcgcaatcctctcgatttccctattgagtgggagagacccaaacctgggaggaggcctgatattttccccaagtttagcccaatgaagacaccattgccaccaccgatgccttatgatcctccagcagaagatgaagaagaagaggaagagaagaaagaagaggaagaagaaaaccctgaccaagaagaagaggaacaaccggagaagcaacaatagattttttttagtttgcgagcgaaagatggaaacatcgagatctaagtctgtttctgagttttgtagtgtctttttggaggagaggaaatcaatcgttctcacatttagtagctagattaaaatctcatgcaatctcatgctcgtgttactcgtgtactatgtttcgtgtaataatgatacagctttataagaatctatcatttccgccgaaaaaaaaaaaaaaaa

SEQ ID NO: 9296 - protein, 149 aa, Zea mays
  misc_feature: Ceres CLONE ID no. 1505313
  misc_feature: Ceres CDNA ID no. 25892908
MASLPSASLLPSPSLVVLSPTKIFSSSSSSRSIVCSSPRSHSFSSIPRSSPSLRMTRRANHNKLQVVAMAPEEEKLTRRNPLDFPIEWERPKPGRRPDIFPKFSPMKTPLPPPMPYDPPAEDEEEEEEKKEEEEENPDQEEEEQPEKQQ

SEQ ID NO: 9297 - DNA, 533 bp, Zea mays
  misc_feature: Ceres CLONE ID no. 1505469
  misc_feature: Ceres CDNA ID no. 40352011
  CDS (138)..(341): REFERENCED BY SEQ ID NO: 9298
cgctttcagccccagccgtcgccgtctcccaagttcctccgcaggcccccgctccacgcctctgaccctctccccgtcttcagccgcgtcccggctgtcggcgacccgccgacggtcccgtcgtcgtcgtcgtcgccatgactacctcaagacgtgttgctgataggaaaattgcagtatttgagaagaatatcacgaagaggggttctgttcccgagacagtcaagaaaggaaatgattatcctgttggacctatcgtgcttggattttttgtcttcgttgttgttgggtcatctctgttccagatcatcaggacagcctcaaacgccggtctcttctgagtagattggtgctatgcttatagtgaccatgaacagggctgtcatatgcagttggttgtcggtttaaaactagaactgaatgagatagctggtactcttgtgatgcttgttatacctcttaccattgtacttggtggagtttaagttatatggagatcgtcataccattggactgcaaaaaaaaaaaaaaaa

SEQ ID NO: 9298 - protein, 67 aa, Zea mays; identical to SEQ ID NO: 4336
  misc_feature: Ceres CLONE ID no. 1505469
  misc_feature: Ceres CDNA ID no. 40352011
  misc_feature (1)..(64): Pfam Name: RAMP4 PFAM Desc: Ribosome associated membrane protein RAMP4

SEQ ID NO: 9299 - DNA, 1289 bp, Zea mays
  misc_feature: Ceres CLONE ID no. 1505533
  misc_feature: Ceres CDNA ID no. 25446166
  CDS (361)..(1059): REFERENCED BY SEQ ID NO: 9300
attaaacagttatactctcgtctcgccgtcgctatcgaggcgagctccgtggaagtttgctggctgctgcagagcctaggctcgttcgaggcggtggcggacaggcaggcaggcagctctccgttcggcttggcttgggcggctgccgcgtcgcgcacctgcgggcgggcagtggacagtggctgggcggtccgggtccggggcagccaggggcgtcgtcgcgctcgtagccactgaggccggcggcggtggcaacgtggcagtgcggtgccgagacaccgttccaccgaggaggctggggcaccgaacagcgaacaacggaagaagagcagctgaacaggcaggggagaggttccagctatgctcaccgcgcagccgccacctgaggtagcgggtgaggatgacagcagttgccaccatgtcttcgtggagtttatgaccaaagccgctcagttcgaggagctcgctgaatctggggagcgattgcttgggagattccgtgaggagcttgagtattttcgtaggccccagattcctaaggaatcagatgtcatgaatcagatacttaaatccaactgcactgtcagaatgaggtcctatgttgaagctggctgcaggcttcactaccaaaacatctcaaacataaatcagttaagctcatgcgaagctggacttaaagatcatataaagaaagctaagactttgctcgaagaacttgaatgtctagtcgagaatgtctatggcatcacattaacatccagtttaagtgctctggaagtttcagacagtcattgcctcgacaacatgccaagcaccgattgctacgccatggaggaggataaatgtgcagatcatttggacatggacgtatcgctcgttacggtgatggtcatggttcgcaacatgctgaagcttgactacacgatgcaggagaagattgtcactgcattgtccttgaaaacaccagcatcggagctcgagggatactgcctcatgtgggatctacgcccgtacatcgatgacgacgtgatgcgtcttgcgtggaacatgtgtccttgaagcattggggctttggagttgtttctgctgggatggatgtctggtctgttcattattatgtgtttgtcgaaggtcgagagatatgttcagtgttatgtatgacgacgtggttgtgtgttcattgtcgtcttctggagacgagaaacagatatagtttgtcagattgaaccccttttgggggttctttttcagagaaaggtctcaaaactgcttcaaaaaaaaaaaaaaaa

SEQ ID NO: 9300 - protein, 232 aa, Zea mays
  misc_feature: Ceres CLONE ID no. 1505533
  misc_feature: Ceres CDNA ID no. 25446166
MLTAQPPPEVAGEDDSSCHHVFVEFMTKAAQFEELAESGERLLGRFREELEYFRRPQIPKESDVMNQILKSNCTVRMRSYVEAGCRLHYQNISNINQLSSCEAGLKDHIKKAKTLLEELECLVENVYGITLTSSLSALEVSDSHCLDNMPSTDCYAMEEDKCADHLDMDVSLVTVMVMVRNMLKLDYTMQEKIVTALSLKTPASELEGYCLMWDLRPYIDDDVMRLAWNMCP

SEQ ID NO: 9301 - DNA, 476 bp, Zea mays
  misc_feature: Ceres CLONE ID no. 1505537
  misc_feature: Ceres CDNA ID no. 40352012
  CDS (9)..(182): REFERENCED BY SEQ ID NO: 9302
atttacatatgcttccatggctgaccaatgtgtatgtgcatccatgtgttgcgatgaatcgcgcagacgtgcgaggcggctgcgcagctgcggaaagccgggaagatcacggtgagggagaccaccctgaagaggctgggcggcacgcacttgaaatacggcgtggcagatggccactttgaggtgacgcggttcgctctgctcgagacgatcaaggaggcgcttccggcggacatgtgggggccggagatgaggaacgcgtggggcgaggcctacgaccaactggtcgcggccatcaaacaagagatgaagccctccgagtagctcatccactgtgttgtgtttgtattgtgtgtttatgtgtactgacgcctattgtaaaatgagcattcaataaaggaacaaattgtgcatgaggtttaccccgttcttcagagttttttttttaaaatagtactccaaaaaaaaaaaaaaaa

SEQ ID NO: 9302 - protein, 29 aa, Zea mays
  misc_feature: Ceres CLONE ID no. 1505537
  misc_feature: Ceres CDNA ID no. 40352012
MWGPEMRNAWGEAYDQLVAAIKQEMKPSE

SEQ ID NO: 9303 - DNA, 1082 bp, Zea mays
  misc_feature: Ceres CLONE ID no. 1505660
  misc_feature: Ceres CDNA ID no. 40041443
  CDS (77)..(835): REFERENCED BY SEQ ID NO: 9304
acacacacacacggcccgcgctgcagcgttgccgcctaccgccacggtgccaccgacgatcgaccacgacgcttccatggctgcctctgcttcccgcctctgccttctcgccatcgcgttcctcctcgccgtcgccgcacctcgcgtggacgcgtggggcggccgcttcttcttcagcaagatgacgcgccccggggccgtcgtcgaggccgacaaggcggcggacacggccaccgtggcgacggaggcgctcgacaccaacagcgcgccggcggcattcccgcggccgtccagcaaccgcggctacggcctctacggccgcccggaggagaacgagaagtacccgccggcctacttccgccgcggcgtgcaccgcgacgccgagaagctgacgaccaccaacgtcgtgccgacgacggagccgcggcaccgggaggaggcggctgtcccggcgcaggaagaacaatcctcgggcgaggaggagccggcgttccccgcggacggcagcggcagggggcggccgctgtcgtacatgcgccacggcggcaagcacgagcgcgactactacgggatgagcgacacgaggctgtaccagaacgggcggtactactacgacgtggagaccgacaagtacggctacggctacgagtccaacccggtgcggacggcgcgccccgagcccgaggacaacggctccgggtacggccgccccggccgcgagcggaggtacggcgacgcggccgtatacgagaacgataacgacaacggggtgaccgagaagcagagcgacgacggcggcgtccaggaaaaccagaacgggcagtacaatccatgagtaagacgtatacgaggggtttgtttctgcttgcgatcgtcagatacgctgtgtggtaggagtataatgctccttgcttgtgtgctgcaagctagcacgacgtcgttactacttgctacttctactatgctgaaggatgagctatctagctcccggtgtggaatggtgttgaaacatattacgtacggatgaataatctgtgtgagtaatggaatgtctactgttattaacaaaaaaaaaaaaaaaa

SEQ ID NO: 9304 - protein, 252 aa, Zea mays
  misc_feature: Ceres CLONE ID no. 1505660
  misc_feature: Ceres CDNA ID no. 40041443
  misc_feature: Homolog of GI Number: 34909618 NR Desc: P0435B05.29
  misc_feature: Homolog of GI Number: 56283929 NR Desc: CG3047
  misc_feature: Homolog of GI Number: 2078483 NR Desc: antifreeze glycopeptide AFGP polyprotein precursor
  misc_feature: Homolog of GI Number: 5821145 NR Desc: RNA binding protein
  misc_feature: Homolog of GI Number: 47124032 NR Desc: SRRM2 protein
  misc_feature: Homolog of GI Number: 5821143 NR Desc: RNA binding protein
  misc_feature: Homolog of GI Number: 6649242 NR Desc: splicing coactivator subunit SRm300
  misc_feature: Homolog of GI Number: 19923466 NR Desc: splicing coactivator subunit SRm300
  misc_feature: Homolog of GI Number: 71891780 NR Desc: KIAA0324 protein
  misc_feature: Homolog of GI Number: 67986517 NR Desc: Flavin
MAASASRLCLLAIAFLLAVAAPRVDAWGGRFFFSKMTRPGAVVEADKAADTATVATEALDTNSAPAAFPRPSSNRGYGLYGRPEENEKYPPAYFRRGVHRDAEKLTTTNVVPTTEPRHREEAAVPAQEEQSSGEEEPAFPADGSGRGRPLSYMRHGGKHERDYYGMSDTRLYQNGRYYYDVETDKYGYGYESNPVRTARPEPEDNGSGYGRPGRERRYGDAAVYENDNDNGVTEKQSDDGGVQENQNGQYNP

SEQ ID NO: 9305 - DNA, 1134 bp, Zea mays
  misc_feature: Ceres CLONE ID no. 1505776
  misc_feature: Ceres CDNA ID no. 40041444
  CDS (100)..(783): REFERENCED BY SEQ ID NO: 9306
cccgagtccccgtgcgctgcgcccccaattcccacgcgcccagacacgccgagaggggagaggaagcgacagccagcagccgaggcggccagcgcaggcatggccactcccacttccagtggcgacggctcgcccccgggctcctctgacctcgtgcccccctcctaccccgagatgatcgtcgccgccctcgccgcgctcgccgaggagaacggctccagccaggccgccatcgcgcgccgcatcgaggcggaggcccgcggcgacctgccggcctcgcacccggcgctcgtcgcagcccacctctcgcccatgtccgccgccggggagctcgtcgccgttgcggggggaaagtacgcgctgccgccgccggtcccaccgccgccggagtcaccggctgacgacgaagaagacgactacgccgacgacgaagaggaggaggaggaggctccggagccggagcctctgccgcagccgcccgctaagcgcgggcgcgggaggcccccgaagccgcggcccacgggcttccccgccggcgtgcccggagctgctggcccgggccccatcggcgtccccggagccgccgccgccgccgccgcgccgcgccggcgcggccgcccgcccaagcctcgggacccgcacgcgccgcccaagattccgcgcccgcgtggccggccgcgcaagaacccgctcccggaggggatggccccgcggccgcgccccggcgcaccagcgtcggccaaggcggcgcgcccgcagttcgccgaggtcggcttcgtctgatgcggggaggtctcgcccgccggccagccggccagggggcggcggcgagctggcgcaagctaacattttgcccctgtgttccagctcttgtctgtttggtgtgggtttcgtctcagttcgtgtgttactgtctaatcccggggagcgtgtaggggcaggagtccgagtggaggcagcttcggcggcggtggccggcggtgtgtcagtggttcgtagtatttctctaccttacgtttgggggtggtggtggccggagtggtgttgctccggcgctgtattctgtgtctccttgtcgcgctcgcgcaatgcaatgcagtagtctgatcgttccatttaaaaaaaaaaaaaaaa

SEQ ID NO: 9306 - protein, 156 aa, Zea mays
  misc_feature: Ceres CLONE ID no. 1505776
  misc_feature: Ceres CDNA ID no. 40041444
  misc_feature (116)..(128): Pfam Name: AT_hook PFAM Desc: AT hook motif
  misc_feature: Homolog of GI Number: 50918237 NR Desc: putative DNA
  misc_feature: Homolog of GI Number: 871498 NR Desc: DNA binding protein
  misc_feature: Homolog of GI Number: 51091572 NR Desc: DNA binding protein PF1
  misc_feature: Homolog of GI Number: 4585621 NR Desc: HMGI/Y protein
  misc_feature: Homolog of GI Number: 15221913 NR Desc: histone H1/H5 family protein
  misc_feature: Homolog of GI Number: 20502966 NR Desc: HMG
  misc_feature: Homolog of GI Number: 8778700 NR Desc: T1N15.25
  misc_feature: Homolog of GI Number: 9837562 NR Desc: high mobility group I/Y
  misc_feature: Homolog of GI Number: 6523547 NR Desc: hydroxyproline
  misc_feature: Homolog of GI Number: 15706274 NR Desc: HMG I/Y like protein
MSAAGELVAVAGGKYALPPPVPPPPESPADDEEDDYADDEEEEEEAPEPEPLPQPPAKRGRGRPPKPRPTGFPAGVPGAAGPGPIGVPGAAAAAAAPRRRGRPPKPRDPHAPPKIPRPRGRPRKNPLPEGMAPRPRPGAPASAKAARPQFAEVGFV

SEQ ID NO: 9307 - DNA, 524 bp, Zea mays
  misc_feature: Ceres CLONE ID no. 1505867
  misc_feature: Ceres CDNA ID no. 36706890
  CDS (82)..(357): REFERENCED BY SEQ ID NO: 9308
gtaaaaaaaaaaccttgacaagaacgaattcgcctccggctctcctcttctcgagcgttttcggcaccacggcgcagtaggatggcggcggcggccccgacgagagcagaggtgctgtcgctcttccgttccttactccgcacggcgaagaagttctcggactacaacatccgcgagtacacgcgccgacgcgccgcggactccttccgcgaaaaccgcgccctcgccgatgcgtcggccgccgccgcggcgttctcggaggggaagaagcagctagaggttgcgaagcggcaagcggtggtttactctctctacgcccccaaggccaagagcgtgatggagttgaaggtgcagtgatggctgcgaccttttcttccccaccgttcccgttccagattcgttgcttttgtgtgatgatgaaactataaactgctccgttgtcgcattttctggatgattgtcatgatatagtttcgttctgtgcaataaattactaaattctaccgccaaaaaaaaaaaaaaaa

SEQ ID NO: 9308 - protein, 91 aa, Zea mays; identical to SEQ ID NO: 9200
  misc_feature: Ceres CLONE ID no. 1505867
  misc_feature: Ceres CDNA ID no. 36706890
  misc_feature (6)..(70): Pfam Name: Complex1_LYR PFAM Desc: Complex 1 protein
  misc_feature: Homolog of GI Number: 31431993 NR Desc: putative CGI
  misc_feature: Homolog of GI Number: 50734067 NR Desc:  similar to chromosome 6 open reading frame 149
  misc_feature: Homolog of GI Number: 62663447 NR Desc:  similar to CDNA sequence BC034664
  misc_feature: Homolog of GI Number: 51593329 NR Desc: CDNA sequence BC034664
  misc_feature: Homolog of GI Number: 38570054 NR Desc: chromosome 6 open reading frame 149
  misc_feature: Homolog of GI Number: 55625814 NR Desc:  similar to Chromosome 6 open reading frame 149
  misc_feature: Homolog of GI Number: 24639281 NR Desc: CG3717

SEQ ID NO: 9309 - DNA, 773 bp, Zea mays
  misc_feature: Ceres CLONE ID no. 1506146
  misc_feature: Ceres CDNA ID no. 25446167
  CDS (2)..(541): REFERENCED BY SEQ ID NO: 9310
agctgagctcggccccaacattcagattcttcgaggcgcggcgacggcggtcggcgacatggaggccgcggtgcccagccgtgttgcgctctccgcggcgagccgcctcccaaatccccacgccgtgacaggagatagatctttcatttacaagggaagatgccaaagtcttgcaattcctatggctttgtcagcagctgcgccaggcaaaggtggtggtgtgcttgatcggccagttgagaaaactactcctggtcgccagtctgaatttgatgtgaagaaatcccggaaaatgtcgcctccataccgtgtcatcctgcacaatgacaactacaacaggcgcgagtacgttgtcaaggtcctgatgaaagtgatccctgggatgaccgtcgacaacgctgtgaacatcatgcaggaggcgcacgtgaatgggctgtcagtggtgattgtctgttcccagtccgaggctgaggagcactgcacgtcgctcaggggcaacggcctccggagctcgatcgagcccgcgagtggtggctgctgaggttcgagacttgggggtataccttcttgttttgccagcgtatagtttgtaaatacccagcgtatcaagctaaagctgaaacggattggttatatgcacttatcgatacaacgaagctgagtacccctctcgggtaggtgtaaatcgtgcaagggtaccctgtagaagaagaaacatagtattttcggttttgatttataaaatatttagttgcacaaaaaaaaaaaaaaaa

SEQ ID NO: 9310 - protein, 160 aa, Zea mays
  misc_feature: Ceres CLONE ID no. 1506146
  misc_feature: Ceres CDNA ID no. 25446167
  misc_feature (77)..(153): Pfam Name: ClpS PFAM Desc: ATP
  misc_feature: Homolog of GI Number: 53763356 NR Desc: COG2127: Uncharacterized conserved protein
  misc_feature: Homolog of GI Number: 48891539 NR Desc: COG2127: Uncharacterized conserved protein
  misc_feature: Homolog of GI Number: 71676716 NR Desc: ATP
  misc_feature: Homolog of GI Number: 45511686 NR Desc: COG2127: Uncharacterized conserved protein
  misc_feature: Homolog of GI Number: 53687478 NR Desc: COG2127: Uncharacterized conserved protein
  misc_feature: Homolog of GI Number: 46119009 NR Desc: COG2127: Uncharacterized conserved protein
MEAAVPSRVALSAASRLPNPHAVTGDRSFIYKGRCQSLAIPMALSAAAPGKGGGVLDRPVEKTTPGRQSEFDVKKSRKMSPPYRVILHNDNYNRREYVVKVLMKVIPGMTVDNAVNIMQEAHVNGLSVVIVCSQSEAEEHCTSLRGNGLRSSIEPASGGC

SEQ ID NO: 9311 - DNA, 1185 bp, Zea mays
  misc_feature: Ceres CLONE ID no. 1506178
  misc_feature: Ceres CDNA ID no. 35383443
  CDS (116)..(982): REFERENCED BY SEQ ID NO: 9312
atccgcaagtcccactactacagtgcccgccgccgctgcgtccaccaccacctcctttcccaactcctccgcgtacccccgccctctccggcggcccgcgtaaccacccgcgcagatggcgacggcggccacggcgtccgctacggcggcgacccgcttcacgctcctagcgggcgccggcctccgcagccgcatcagccgcctccccaccgccgtgcggttccagcgccagcgggggctcaccaccaccgcgctcctgaagaccgccgacctccagcccaaggagcagggcaagcccgagacgctcgactaccgcgtgttcctcgtcgacggcgggggccggaaggtgtcgccgtggcacgacgtcccgctgcgcgccggggacggggtgttccacttcgtcgtcgagatacccaaggagagcagcgccaagatggaggtcgccaccgacgaggccttcacgcccatcaagcaggacaccaagaagggcaaccttcgatactacccgtacaacattaactggaactatgggttacttcctcaaacatgggaggacccaacttctgcaaattctgaggttgaaggagcatttggggataatgatcctgttgatgttgttgagataggtgaaagacgtgccaatgtcggggacgttcttaaggttaagccattggcagctttagcaatgattgatgagggagagcttgactggaaaattgtggccatttctttggatgacccgaaagcatctcttgtgaacgacgtggatgatgttgagaagcattttccggggacactgactgccatcagagactggttcagagactacaagatacctgatggaaagcctgccaacaaatttggtctcggcaacaagcccgcaagcaaggaatacgccctgaaggtcattcaagagaccaacgaatcatgggagaaattggtaaagagaaatattcccgctggagagctctcgttggcctgattttggcccatggaagccaccacattcttttgaactgctttcgtgagcatgtcgttttgtatgctgtgaccatgcttcttcgtttgcattccaaaccttttttacgaactgtttaacaaaaatgatcttgtcggataaataatgattctggtgcgagtttaccagaacggcaaggagtttctcaagtaaaaaaaaaaaaaaaa

SEQ ID NO: 9312 - protein, 288 aa, Zea mays
  misc_feature: Ceres CLONE ID no. 1506178
  misc_feature: Ceres CDNA ID no. 35383443
  misc_feature (94)..(274): Pfam Name: Pyrophosphatase PFAM Desc: Inorganic pyrophosphatase
  misc_feature: Homolog of GI Number: 50913151 NR Desc: putative inorganic pyrophosphatase
  misc_feature: Homolog of GI Number: 19310711 NR Desc: putative inorganic pyrophosphatase
  misc_feature: Homolog of GI Number: 21592878 NR Desc: inorganic pyrophosphatase
  misc_feature: Homolog of GI Number: 51964418 NR Desc: PREDICTED OJ1767_D02.15
  misc_feature: Homolog of GI Number: 14571671 NR Desc: inorganic pyrophosphatase precursor
  misc_feature: Homolog of GI Number: 47122952 NR Desc: MGC81379 protein
  misc_feature: Homolog of GI Number: 29420791 NR Desc: inorganic pyrophosphatase
  misc_feature: Homolog of GI Number: 66507623 NR Desc:  similar to ENSANGP00000027279
  misc_feature: Homolog of GI Number: 62644404 NR Desc:  similar to Inorganic pyrophosphatase 2
  misc_feature: Homolog of GI Number: 55633953 NR Desc:  similar to inorganic pyrophosphatase
MATAATASATAATRFTLLAGAGLRSRISRLPTAVRFQRQRGLTTTALLKTADLQPKEQGKPETLDYRVFLVDGGGRKVSPWHDVPLRAGDGVFHFVVEIPKESSAKMEVATDEAFTPIKQDTKKGNLRYYPYNINWNYGLLPQTWEDPTSANSEVEGAFGDNDPVDVVEIGERRANVGDVLKVKPLAALAMIDEGELDWKIVAISLDDPKASLVNDVDDVEKHFPGTLTAIRDWFRDYKIPDGKPANKFGLGNKPASKEYALKVIQETNESWEKLVKRNIPAGELSLA

SEQ ID NO: 9313 - DNA, 596 bp, Zea mays
  misc_feature: Ceres CLONE ID no. 1506895
  misc_feature: Ceres CDNA ID no. 25446168
  CDS (2)..(214): REFERENCED BY SEQ ID NO: 9314
agtcgataaccaagaacaaaccattgttggacgcgttcccctcctgcacgcaacctcatctcgtcctccagatcctggatggccgtcctccttgataccttgcctcgcgagtgctctcggtgagctactttgttttgatttatcaggaaatccgtttgcttcatgttatgcaggctcagatctgattgctggattcggcatcttacgggcttgaatagagctaggactgggagaaaacaacaaacccgcgttggatcctgtatcggttagtccttgccttcaaggttcatgttgttttgttttggtggtcgagcatcgcatgttctgcttctggttccagatctggagaaatttctaagtcgtcgtcgtcgtcgtcgttcggttcggagcggatctgaggcgacgatggctggaggcggcgggatctcttggtctgcagtcctgcttcacctcgatggatgatgtctctgcgctgataattattggatcaatttcgataattattagtagatctatgagatatgccgcctggaagaggcgaggtaagctgcagcatgtaaaagtctgcgtgcgtcgacagcaaaaaaaaaaaaaaa

SEQ ID NO: 9314 - protein, 57 aa, Zea mays; identical to SEQ ID NO: 6740
  misc_feature: Ceres CLONE ID no. 1506895
  misc_feature: Ceres CDNA ID no. 25446168

SEQ ID NO: 9315 - DNA, 641 bp, Zea mays
  misc_feature: Ceres CLONE ID no. 1506934
  misc_feature: Ceres CDNA ID no. 25446169
  CDS (96)..(494): REFERENCED BY SEQ ID NO: 9316
agacaccttccccgcacaccggttgcgatccgccgccatcgcttcaagcagcgaaccctagccgccctcagcgacggattgcagatctcccagccatgacgttcaagcggaggaacggcggacgcaacaagcacgggcgcggccacgtcaagtacatacgctgctccaactgcgccaagtgctgtccaaaggataaggctatcaagcggttcttggtgaggaacattgttgagcaggctgctgtgagggacgtgcaggaggcttgtgtgcatgatggatatgttcttcccaaattgtacgcaaaggttcatcactgtgtctcatgcgcaatccatgcgcacattgtccgtgtccgctctcgtgagaacaggaggaaccgtgagcccccgcagcgtttcaggcgccgggatgatggcccaaggccaggtcagggcccaccgcgcccaggtgctgctgccacagcagctccccctgctgccgctcctcgtacctaagttcaggaatgcgtttcagggcttagttctctcacctatgggataatggacttttcctgttttgaaaaccaatgtactgtacccccttgatgtcaaaattttagcacaatttgtggttcgttcttctgtctaaaaaaaaaaaaaaaa

SEQ ID NO: 9316 - protein, 132 aa, Zea mays; identical to SEQ ID NO: 6886
  misc_feature: Ceres CLONE ID no. 1506934
  misc_feature: Ceres CDNA ID no. 25446169
  misc_feature (1)..(117): Pfam Name: Ribosomal_S26e PFAM Desc: Ribosomal protein S26e
  misc_feature: Homolog of GI Number: 57900258 NR Desc: putative ribosomal protein S26
  misc_feature: Homolog of GI Number: 50931777 NR Desc: putative 40S ribosomal protein S26
  misc_feature: Homolog of GI Number: 7440567 NR Desc: probable ribosomal protein S31
  misc_feature: Homolog of GI Number: 5706704 NR Desc: ribosomal protein S26
  misc_feature: Homolog of GI Number: 56236112 NR Desc: At2g40510
  misc_feature: Homolog of GI Number: 22137298 NR Desc: AT3g56340/F18O21_300
  misc_feature: Homolog of GI Number: 20466414 NR Desc: 40S ribosomal protein S26
  misc_feature: Homolog of GI Number: 24111313 NR Desc: At2g40590/T2P4.6
  misc_feature: Homolog of GI Number: 3885515 NR Desc: similar to ribosomal protein S26
  misc_feature: Homolog of GI Number: 61654752 NR Desc: S26

SEQ ID NO: 9317 - DNA, 726 bp, Zea mays
  misc_feature: Ceres CLONE ID no. 1506995
  misc_feature: Ceres CDNA ID no. 25446594
  CDS (13)..(330): REFERENCED BY SEQ ID NO: 9318
aagccgacaccgatgactccacatagaatcgcccctgctccctccccttctccggctccctcccctcccttggggagtccgagtcgggagcgtttcccctccctcggagactccgagtcggaagcgggtcacttgaaagccgcggaagagggtctgcacgaggaaggtgagaggagccaagctcaggactccgacgccgagctccagcagcccagccccagccccgaagtcgaccctctggccagggccgtgctcgtgacccccaccactccttcagcattcaccagtgatgaggatatcctcgagctcgctcgcagccgcgacatctagagttgcctatgtcacggtgactaagcagccccttctgttatgccaatcaatccatccatccatatgctaataaatatggtgtggttggatttttatgcgtttccatcaactacatatgactgtcttgttcggttcatgttgcaagtcgcagtattttgggcatgtggaagttaactatgccgtgcttgattggcacaagaaaactcactgtattttgggcatgtggaagttagctatgccgtgcttgattggcacaagaaaactcactgtattttgggcatgtggaagctaactatgccgtgcttggttggcacaagaaaactcactgtattttgggcatgtggaagttaactatgcttgcttgattgttgattggcacaaaaaaaaaaaaaaaaa

SEQ ID NO: 9318 - protein, 105 aa, Zea mays
  misc_feature: Ceres CLONE ID no. 1506995
  misc_feature: Ceres CDNA ID no. 25446594
MTPHRIAPAPSPSPAPSPPLGSPSRERFPSLGDSESEAGHLKAAEEGLHEEGERSQAQDSDAELQQPSPSPEVDPLARAVLVTPTTPSAFTSDEDILELARSRDI

SEQ ID NO: 9319 - DNA, 777 bp, Zea mays
  misc_feature: Ceres CLONE ID no. 1506997
  misc_feature: Ceres CDNA ID no. 25446777
  CDS (119)..(490): REFERENCED BY SEQ ID NO: 9320
aaactgcaagcctgcaacaactcaacaaagacgtgcacacacagtcatacacaagtagagataccctgccatctcctatattgtgtgtgtttgtcgtgtcatctcctatctcgatcatatggcgctggcgcacgtggcggcgaggttcatgacggaggtggcgccgccgcaggtggtgtcggtcatgcggcagaggaggaagaaggtgccgaggagcctggacaccatcgccgaggacgacagggagcagcagctggcgtgcgggccaccgtcggaccacggcttcgcggcggcgtggtcgctgccgacgccgacgccgacgccgccgcagccacgggagcgcgcgggcgggttcgtggcgaggggcctcgtcggcaagtacttgtcggacgcccacgacggctgccaggccagtggctgggagggtgggcacatgctaggccaccggcgagccgtgcatgcgcaggagctgcacgaggtcggagcttgaagaggggggagagagaacatcatctctagctgcatgcagtgagcttgttttgggctgggtccgcccctgtttgtaccacttccacacgtgcgctcatgcatgataatttaattacctttagctttattacgcgtgaagtggagagcatatcactagtagaaaagcttacacacggtttcagtatcaagtgtacagtaaggttatttgtagcggcgttttttttaaaaaaacacatgtataaatcatatttatactaaaaaaaaaaaaaaaaaaaaaaaaaaaaaaaa

SEQ ID NO: 9320 - protein, 123 aa, Zea mays
  misc_feature: Ceres CLONE ID no. 1506997
  misc_feature: Ceres CDNA ID no. 25446777
MALAHVAARFMTEVAPPQVVSVMRQRRKKVPRSLDTIAEDDREQQLACGPPSDHGFAAAWSLPTPTPTPPQPRERAGGFVARGLVGKYLSDAHDGCQASGWEGGHMLGHRRAVHAQELHEVGA

SEQ ID NO: 9321 - DNA, 1108 bp, Glycine max
  misc_feature: Ceres CLONE ID no. 1507510
  misc_feature: Ceres CDNA ID no. 24726459
  CDS (49)..(918): REFERENCED BY SEQ ID NO: 9322
accgactcgcgccttttgccgttaaatcgaatctcaaaaacatcaaccatggcggcggcgaacgagcacaccgtcctacaattcgcgactccgtcgtcgacaacctccatcctcacggcgaggatccaccccctcgtgatcttcaacgtctgcgattgcttcgtgagacgtcccgactcagccgaacgagtcatcggcactctcctcggatcaatcctacccgacggaaccgtcgacatccgcaactcgtacgccgttcctcacaacgaatcctccgatcaggtcgctgtggatattgattatcaccacaacatgttagcttcgcaccttaaggtgaatcccaaggagatcatcgttggctggtattcaactggtcttggggtgaatggtggtagtgctttgattcatgacttctacgctagagaagccactaaccctattcatctgactgtggacactggttttacaaatggtgagggtgctatcaaagcttttgtatcttcaaacctttcacttggtgatcgtcagctagctgcacagtttcaagaggttcctgttgatctccgtatggttgaggctgagagggtcggatacgatgtcctcaaggcaacagcggttgacaaactcccaaatgacatggaaggaatggagctaacactggagagactgttgactttaatcaacgatgtctacaaatatgttgacagcgtcgtggaaggtcaaagacttccagacaacaacataggacgattcattgcagaggcagtagcctcgcttcccaaattacccccgcaagtctttgataaccttgtgaatgatagtctccaggaccaattgcttctgttgtacctgtcgagcataacaaggacacagctgagtctagcggagaagctaaacacagccgctcaaatgctgtaattaagcttttgaaacacaaggttttgctgaaaatgaggaatgttgcttttggtttcaatgtttttttttttttttgacaaaaagtttgtgtaagattcagtctccgagtatggatggtgtagcgtcataagactttcggattcgagatactaaaacaacacgttgtgttgatataaaaaaaaaaaaaaaa

SEQ ID NO: 9322 - protein, 289 aa, Glycine max
  misc_feature: Ceres CLONE ID no. 1507510
  misc_feature: Ceres CDNA ID no. 24726459
  misc_feature: null
  misc_feature: Useful for making plants with altered alkaloid content
  misc_feature: Useful for making plants with altered terpenoid content
  misc_feature (19)..(129): Pfam Name: Mov34 PFAM Desc: Mov34/MPN/PAD
  misc_feature: Homolog of GI Number: 20260040 NR Desc: 26S proteasome regulatory subunit
  misc_feature: Homolog of GI Number: 20259173 NR Desc: putative 26S proteasome regulatory subunit
  misc_feature: Homolog of GI Number: 16225442 NR Desc: 26S proteasome regulatory subunit S12 isolog
  misc_feature: Homolog of GI Number: 67083805 NR Desc: eukaryotic translation initiation factor 3 subunit 5 epsilon
  misc_feature: Homolog of GI Number: 62641108 NR Desc:  similar to eukaryotic translation initiation factor 3
  misc_feature: Homolog of GI Number: 34858904 NR Desc: similar to eukaryotic translation initiation factor 3
  misc_feature: Homolog of GI Number: 68382896 NR Desc:  similar to eukaryotic translation initiation factor 3
  misc_feature: Homolog of GI Number: 61816288 NR Desc:  similar to eukaryotic translation initiation factor 3
  misc_feature: Homolog of GI Number: 53237082 NR Desc: Eukaryotic translation initiation factor 3
  misc_feature: Homolog of GI Number: 30584931 NR Desc: Homo sapiens eukaryotic translation initiation factor 3
MAAANEHTVLQFATPSSTTSILTARIHPLVIFNVCDCFVRRPDSAERVIGTLLGSILPDGTVDIRNSYAVPHNESSDQVAVDIDYHHNMLASHLKVNPKEIIVGWYSTGLGVNGGSALIHDFYAREATNPIHLTVDTGFTNGEGAIKAFVSSNLSLGDRQLAAQFQEVPVDLRMVEAERVGYDVLKATAVDKLPNDMEGMELTLERLLTLINDVYKYVDSVVEGQRLPDNNIGRFIAEAVASLPKLPPQVFDNLVNDSLQDQLLLLYLSSITRTQLSLAEKLNTAAQML

SEQ ID NO: 9323 - DNA, 908 bp, Glycine max
  misc_feature: Ceres CLONE ID no. 1507644
  misc_feature: Ceres CDNA ID no. 36519581
  CDS (1)..(759): REFERENCED BY SEQ ID NO: 9324
acagagcccgaagcgaaaggtaatcccaatccccacagaaatccccatctcaaaaccctagccctcatccccgatcccggcgagcgagatggccaacccgagggtgttcttcgacatgaccgtcggcggcgcgccggccgggcgcatcgtgatggagctgtacaaggacgcggtgccgcggacggtggagaacttccgcgcgctgtgcaccggcgagaagggcgtcggcaagagcggcaagccgctgcactacaagggcagcgccttccaccgcgtgatccccgacttcatgtgccagggcggcgacttcacccggggcaacggcaccggcggcgagtccatctacggcgagaagttcgccgacgagaagttcgtccacaagcacaccaagcccgggatcctctccatggccaacgcggggcccaacaccaacggctcccagttcttcatctgcaccgtcccctgcaattggctcgacggcaagcacgtggtcttcggcaaggtcgtcgagggcatggacgtcgtcaagaacatcgagaaggtgggctcccgcagcggcacctgctccaagcaggtggtcatcgccgactgcggccagctctagatccgcccgcgcgcgggtcgcctttcgccgtcgtcgtcgccgccccgtgtgtcccgtgtcgtgtcgtcgatctaaataagagagtcgtgtgtcgtgtcgtgtcttcccctggtccgtccgatgagatctccgtggttggtttaggagggttttaggtggactctttgggctgctggatctctgtccggccgccttggttatcttcctgtgtctgctgctatcttaccgtttgaatgagatgaactccgctatgaattatccattatttgtgcgcttggcttcatatctaaaaaaaaaaaaaaaa

SEQ ID NO: 9324 - protein, 171 aa, Glycine max
  misc_feature: Ceres CLONE ID no. 1507644
  misc_feature: Ceres CDNA ID no. 36519581
  misc_feature (5)..(171): Pfam Name: Pro_isomerase PFAM Desc: Cyclophilin type peptidyl
  misc_feature: Homolog of GI Number: 13925737 NR Desc: cyclophilin A
  misc_feature: Homolog of GI Number: 13925734 NR Desc: cyclophilin A
  misc_feature: Homolog of GI Number: 50904851 NR Desc: peptidylprolyl isomerase Cyp2
  misc_feature: Homolog of GI Number: 600769 NR Desc: cyclophilin 2
  misc_feature: Homolog of GI Number: 829148 NR Desc: cyclophilin
  misc_feature: Homolog of GI Number: 62728587 NR Desc: cyclophilin
  misc_feature: Homolog of GI Number: 18076088 NR Desc: cyclophilin
  misc_feature: Homolog of GI Number: 1563719 NR Desc: cyclophylin
  misc_feature: Homolog of GI Number: 52788398 NR Desc: cyclophilin
  misc_feature: Homolog of GI Number: 18376589 NR Desc: putative cyclosporin A
MANPRVFFDMTVGGAPAGRIVMELYKDAVPRTVENFRALCTGEKGVGKSGKPLHYKGSAFHRVIPDFMCQGGDFTRGNGTGGESIYGEKFADEKFVHKHTKPGILSMANAGPNTNGSQFFICTVPCNWLDGKHVVFGKVVEGMDVVKNIEKVGSRSGTCSKQVVIADCGQL

SEQ ID NO: 9325 - DNA, 589 bp, Glycine max
  misc_feature: Ceres CLONE ID no. 1508299
  misc_feature: Ceres CDNA ID no. 36529460
  CDS (17)..(406): REFERENCED BY SEQ ID NO: 9326
aacacccttcgccaaaatgcagatcttcgtcaagaccctcacggggaagaccatcaccctcgaggttgagagcagcgataccatcgacaatgtcaaggccaagatccaggacaaggaggggatcccgccggaccagcagcggctgatcttcgccggcaagcagttggaggacggccgcacccttgccgactacaacatccagaaggagtcgaccctccatctcgtcctcaggctccgcggaggcatcatcgagccatccctgcaggcgcttgcccgcaagtacaaccaggagaagatgatctgccgcaaatgctatgcgcgcctgcaccctagggctgtcaactgccgcaagaagaagtgtggccacagcaaccagctgaggcccaagaagaagatcaagaactagagtgccactagtcagtttcatgggccggttgaatccatcgcgtgtcggagtttatgctattatcgtctcgtttgtcgttgaaccttattttactttgctttcagcctcgtatcgttgtggtgataattgacagtattggtatatggtagcagacctataattttgccgaaaaaaaaaaaaaaa

SEQ ID NO: 9326 - protein, 129 aa, Glycine max; identical to SEQ ID NO: 3710
  misc_feature: Ceres CLONE ID no. 1508299
  misc_feature: Ceres CDNA ID no. 36529460
  misc_feature (1)..(74): Pfam Name: ubiquitin PFAM Desc: Ubiquitin family
  misc_feature (77)..(128): Pfam Name: Ribosomal_L40e PFAM Desc: Ribosomal L40e family
  misc_feature: Homolog of GI Number: 52077170 NR Desc: ubiquitin / ribosomal protein CEP52
  misc_feature: Homolog of GI Number: 71040673 NR Desc: ubiquitin fusion protein
  misc_feature: Homolog of GI Number: 322750 NR Desc: ubiquitin / ribosomal protein CEP52
  misc_feature: Homolog of GI Number: 395079 NR Desc: ubiquitin/ribosomal protein
  misc_feature: Homolog of GI Number: 16323384 NR Desc: putative ubiquitin extension protein UBQ1
  misc_feature: Homolog of GI Number: 76559884 NR Desc: TPA: ubiquitin
  misc_feature: Homolog of GI Number: 50920549 NR Desc: Putative ubiquitin / ribosomal protein CEP52
  misc_feature: Homolog of GI Number: 73954303 NR Desc:  similar to ubiquitin A
  misc_feature: Homolog of GI Number: 73986078 NR Desc:  similar to ubiquitin A
  misc_feature: Homolog of GI Number: 13569612 NR Desc: ubiquitin A

SEQ ID NO: 9327 - DNA, 884 bp, Glycine max
  misc_feature: Ceres CLONE ID no. 1508485
  misc_feature: Ceres CDNA ID no. 25445467
  CDS (2)..(556): REFERENCED BY SEQ ID NO: 9328
tcaatcgcgccgccgctcgagcccctctcgcccttcgcgccgctgctgctgcaggcaaccgccgccgccgtcgccggagctaaacccctcgcctgacgccatggggcgtatgcacagccgcgggaagggtatctcgtcgtcggcgctgccgtacaagaggactcccccgagctgggtcaagaccgccgtcgctgatgtcgacgagttgatcacgaaggctgcgaagaagggtcagatgccctcgcagatcggtgttctgctccgtgaccagcacggtatccccctcgtcaagagcgttaccggaagcaagatcctccgcatcctcaaggctcatggcctggcgccggaaatcccagaggatctgtactttttgattaagaaggctgtggccattaggaagcatcttgagaggaacaggaaggacaaggactccaaattcaggctcattcttgttgagagcaggatccaccgtcttgcccgttactacaagcgcaccaagaagctcccgcccacctggaagtacgagtctaccactgccagcactctggtggcttaggagggctcttcatctggtgtgctcttaccggcttcaggatggtcttgttctacatattatcaatttcatgtaacgcttttgagtttggagcgatttagatgaacaagagaccaaattttctatgtttacttggagaatcccataaaccatttttggttttgcaattctgtctggttctgtttagcgtctatctacaattcatcagttaaaattagacattgtgatattcgtgttgtctgatctgagcgagtgtaatcgctgctttcagtgcactcaagctcggacagtttgactatatggttattgcacatcaaaaaaaaaaaaaaaa

SEQ ID NO: 9328 - protein, 151 aa, Glycine max; identical to SEQ ID NO: 5618
  misc_feature: Ceres CLONE ID no. 1508485
  misc_feature: Ceres CDNA ID no. 25445467
  misc_feature (1)..(60): Pfam Name: Ribosomal_S13_N PFAM Desc: Ribosomal S13/S15 N
  misc_feature (65)..(151): Pfam Name: Ribosomal_S15 PFAM Desc: Ribosomal protein S15
  misc_feature: Homolog of GI Number: 52548254 NR Desc: cytoplasmatic ribosomal protein S13
  misc_feature: Homolog of GI Number: 288059 NR Desc: cytoplasmatic ribosomal protein S13
  misc_feature: Homolog of GI Number: 50940531 NR Desc: putative 40S RIBOSOMAL PROTEIN S13
  misc_feature: Homolog of GI Number: 50940529 NR Desc: putative 40S RIBOSOMAL PROTEIN S13
  misc_feature: Homolog of GI Number: 19699318 NR Desc: AT3g60770/T4C21_180
  misc_feature: Homolog of GI Number: 30102866 NR Desc: At4g00100
  misc_feature: Homolog of GI Number: 15450535 NR Desc: AT3g60770/T4C21_180
  misc_feature: Homolog of GI Number: 8131699 NR Desc: cytoplasmic ribosomal protein S13
  misc_feature: Homolog of GI Number: 48209913 NR Desc: cytoplasmic ribosomal protein S13
  misc_feature: Homolog of GI Number: 44662862 NR Desc: ribosomal protein S13
  misc_feature: Useful for making bigger plants
  misc_feature: Useful for making ornamental plants with modified flowers
  misc_feature: Useful for sterility

SEQ ID NO: 9329 - DNA, 1102 bp, Glycine max
  misc_feature: Ceres CLONE ID no. 1508487
  misc_feature: Ceres CDNA ID no. 29191787
  CDS (55)..(912): REFERENCED BY SEQ ID NO: 9330
aaaaactcatcaatctcttcctctatatctctctcatcctcatcatctttggtcatggcaaaggacttggaggtgcaagatggcggagcaacggcggcgagagattatgttgatcctcctcccgctccattgttggacatggaggagtttgggaagtggtcgctctacagagcggtcatagctgagtttgtggcgacacttctcttcctttacgtctcagtcctcaccgtaatcgggtacaaagctcagaccgactcaaacgccggaggagttgactgcggcggcgttggaatattggggattgcatgggctttcggtggaatgatttttgttctcgtttactgtaccgccggtgtctccggtggtcatataaatccggctgtgacgttcggattgttcttagctagaaaagtgtcattggtgcggacagtgttatacattgtggctcagtgccttggtgctatctgcggttgcggtctggtcaaagcattccaaagttcttactacaccagatatggaggtggagccaacgagctagctgacggctacaacaaaggaaccggactaggtgcggagatcatcggcacatttgtcctagtctacaccgttttctcggccacagatcctaagcgaagtgcacgtgactctcacattccagttttggcgccacttcccattggctttgctgtcttcatggttcacctagccaccattcccatcaccggtaccggaatcaacccggcccgaagcttcggtgccgcagttatctacaaccaagaaaaggcctgggacgaccaatggattttctgggtgggaccaatgatcggagcagcagctgctgcattataccatcagtttgttctaagagcggctgggatcaaaagtcttggctcctttaggagctctgcgtaattttaattgtttaaaattaagccacaagttcatctttaataaaatgatgattactacaaattccactacctagaggaagttacgtttatctttttatttatgtactctgtttcttaatttcatggaattttcccttcggttgtaaatgttgtttaatttatgttgctttaagataaaaaaaaaaaaaaaa

SEQ ID NO: 9330 - protein, 285 aa, Glycine max
  misc_feature: Ceres CLONE ID no. 1508487
  misc_feature: Ceres CDNA ID no. 29191787
  misc_feature (31)..(266): Pfam Name: MIP PFAM Desc: Major intrinsic protein
  misc_feature: Homolog of GI Number: 21592851 NR Desc: mipC protein
  misc_feature: Homolog of GI Number: 28395420 NR Desc: plasma intrinsic protein 2
  misc_feature: Homolog of GI Number: 3551133 NR Desc: Plasma membrane aquaporin
  misc_feature: Homolog of GI Number: 28395418 NR Desc: plasma intrinsic protein 2
  misc_feature: Homolog of GI Number: 5081421 NR Desc: plasma membrane intrinsic protein 1
  misc_feature: Homolog of GI Number: 4371284 NR Desc: aquaporin
  misc_feature: Homolog of GI Number: 21593439 NR Desc: plasma membrane intrinsic protein 2a
  misc_feature: Homolog of GI Number: 57336898 NR Desc: putative plasma membrane intrinsic protein
  misc_feature: Homolog of GI Number: 3158476 NR Desc: aquaporin 2
  misc_feature: Homolog of GI Number: 21554356 NR Desc: aquaporin
  misc_feature: Useful for delaying flowering time
  misc_feature: Useful for increasing chlorophyll and photosynthetic capacity
  misc_feature: Useful for making larger plants
  misc_feature: Useful for making ornamental plants with modified leaves
  misc_feature: Useful for making plants with increased biomass and foliage
  misc_feature: Useful for making smaller plants
  misc_feature: Useful for making stronger plants
MAKDLEVQDGGATAARDYVDPPPAPLLDMEEFGKWSLYRAVIAEFVATLLFLYVSVLTVIGYKAQTDSNAGGVDCGGVGILGIAWAFGGMIFVLVYCTAGVSGGHINPAVTFGLFLARKVSLVRTVLYIVAQCLGAICGCGLVKAFQSSYYTRYGGGANELADGYNKGTGLGAEIIGTFVLVYTVFSATDPKRSARDSHIPVLAPLPIGFAVFMVHLATIPITGTGINPARSFGAAVIYNQEKAWDDQWIFWVGPMIGAAAAALYHQFVLRAAGIKSLGSFRSSA

SEQ ID NO: 9331 - DNA, 716 bp, Zea mays
  misc_feature: Ceres CLONE ID no. 1508996
  misc_feature: Ceres CDNA ID no. 25446171
  CDS (181)..(462): REFERENCED BY SEQ ID NO: 9332
aatataatgatgcgcagttctcttgcgtgttcgagaaaaaaaaatctctattactttcactagtgacccacaccccacacaaactgagctagccacaggcacagttcatatgctgcatattggtttgaatggaacatttataaaataactattgatatttttcttcagtatacgattgcgatgatgggatatggtccagaagacaaaaatgctgtattggagttgacctacaactatggggtgaaggaatatgataagggaaatgcttatgcacagattgctattagtactgatgatgtctacaaaactgcggaagcaattagagtaaatggtggacaaattactcgtgaacctggcccattacctggcatcaccaccaagataactgcatgcacagatccagatggctggaaaacagtgtttgtcgataacatagattttctgaaggagttggaagaatgagctttgctagagatctcaacttggtacatcaagctccatacggttgcaccccgtgagttccatgcatgacctgcaaaatctttgtaaagccacagcctcaaactgaggattgtagataggtcgtccaatctacggcatcatcgcaattgatagttgatagagcattagattttccttgcagatctatatagatgcgcaaccgtttttgtattatgcattttaatgcataagttcaatgaaaaaaaaaaaaaaaa

SEQ ID NO: 9332 - protein, 93 aa, Zea mays
  misc_feature: Ceres CLONE ID no. 1508996
  misc_feature: Ceres CDNA ID no. 25446171
  misc_feature (12)..(81): Pfam Name: Glyoxalase PFAM Desc: Glyoxalase/Bleomycin resistance protein/Dioxygenase superfamily
  misc_feature: Homolog of GI Number: 50933389 NR Desc: putative glyoxalase
  misc_feature: Homolog of GI Number: 19310505 NR Desc: At1g67280/F1N21_10
  misc_feature: Homolog of GI Number: 25350143 NR Desc: protein F1N21.10
  misc_feature: Homolog of GI Number: 21537360 NR Desc: glyoxalase I
  misc_feature: Homolog of GI Number: 50252391 NR Desc: putative glyoxalase I
  misc_feature: Homolog of GI Number: 7619802 NR Desc: putative glyoxalase I
  misc_feature: Homolog of GI Number: 11281993 NR Desc: lactoylglutathione lyase
  misc_feature: Homolog of GI Number: 37932483 NR Desc: glyoxalase I
  misc_feature: Homolog of GI Number: 9655474 NR Desc: lactoylglutathione lyase
  misc_feature: Homolog of GI Number: 30682449 NR Desc: lactoylglutathione lyase
MMGYGPEDKNAVLELTYNYGVKEYDKGNAYAQIAISTDDVYKTAEAIRVNGGQITREPGPLPGITTKITACTDPDGWKTVFVDNIDFLKELEE

SEQ ID NO: 9333 - DNA, 793 bp, Zea mays
  misc_feature: Ceres CLONE ID no. 1509035
  misc_feature: Ceres CDNA ID no. 40352013
  CDS (121)..(501): REFERENCED BY SEQ ID NO: 9334
agatgtttttatagtttcctgactccgtgacgtctgtggccgcagtcgctgatcgccggggaggacttccagcatatcctgcgtttgctgaacaccaacgtggatgggaagcagaagatcatgttcgccatgacctcaatcaagggtgtcgggcgccgcttctccaacatcgtctgcaagaaggccgacatcgacatgaacaagagggccggcgagctgacgcctgatgagctggagcgcctgatgacggtcgtggccaaccctaggcaattcaaggtgccggactggttcctcaacaggaagaaggattacaaggacggcaggttctcgcaggtcgtctccaacgcccttgatatgaagctcagggacgaccttgagaggctcaagaagatcaggaaccaccgtggtctgcgtcactactggggcctccgcgtccgtggccagcacaccaagactactggcaggcgtggaaagaccgttggtgtctccaagaagcgatgagctctatatcaccccgacaaatcttggccgcactaccatgtcggtttgtgtccaaacagtcctgatgaagggtttctgtttaggcagtttcctgaaatggtgttttgctctaggacaatatcgcggttattgaaccttaatatatcgtgtccctgggatgtgttttttttttgccactttataagtaatttcatttggatgagacttaattctggtttgactccttacattgttaactcttgacccgagaggagtgccttcccagtgcagttcgtccaaaaaaaaaaaaaaa

SEQ ID NO: 9334 - protein, 126 aa, Zea mays
  misc_feature: Ceres CLONE ID no. 1509035
  misc_feature: Ceres CDNA ID no. 40352013
  misc_feature (1)..(116): Pfam Name: Ribosomal_S13 PFAM Desc: Ribosomal protein S13/S18
MFAMTSIKGVGRRFSNIVCKKADIDMNKRAGELTPDELERLMTVVANPRQFKVPDWFLNRKKDYKDGRFSQVVSNALDMKLRDDLERLKKIRNHRGLRHYWGLRVRGQHTKTTGRRGKTVGVSKKR

SEQ ID NO: 9335 - DNA, 704 bp, Zea mays
  misc_feature: Ceres CLONE ID no. 1509050
  misc_feature: Ceres CDNA ID no. 25892909
  CDS (88)..(510): REFERENCED BY SEQ ID NO: 9336
accaatctctcagcccccacaatctcacctactccggccatctctccggcgaccaccgcagcaccacccttccttccgactccagcgatggcgacagcggcagccggcggcgggaggggcaagccgaagggcagcaagtcggtgtcgcggtcggtgaaggcgggcctgcagttccccgtcggccgcgtcgcccggcacctcaaggtcggccgctacgcgaagcgcgtgggcgcgggcgcccccgtctacctctgcgccgtcctcgagtacctcgccgccgaggccctggagctggccggcaacgcggcgcgcgacaacaagaagacccggatctcgccgcgccacatccagctcgccgtccgcaacgacgaggagctcagccggctgctcggcggcgtcaccatcgccgccggcggcgtcctgcccaacatccactccgtgctcctccccaagaaggccggcaagggcgccggcaccggcgggtccgcttcgcagtcccaggagttctagagtaccagagatctgagtatggcgtggtgatggttttaggttggtagattagttcttggccaatgttcttgttggtacatgtatcgagggtggatctggttggaatggaatgcatctggttctgctgtctgtgatttgtccatggtaatctgaatgaaacggattttgctttgctctgaaaaaaaaaaaaaaaa

SEQ ID NO: 9336 - protein, 140 aa, Zea mays; identical to SEQ ID NO: 1936
  misc_feature: Ceres CLONE ID no. 1509050
  misc_feature: Ceres CDNA ID no. 25892909
  misc_feature (21)..(96): Pfam Name: Histone PFAM Desc: Core histone H2A/H2B/H3/H4
  misc_feature: Homolog of GI Number: 77555982 NR Desc: histone h2a.
  misc_feature: Homolog of GI Number: 3204129 NR Desc: histone H2A
  misc_feature: Homolog of GI Number: 297871 NR Desc: histone H2A
  misc_feature: Homolog of GI Number: 21553797 NR Desc: histone H2A
  misc_feature: Homolog of GI Number: 20334750 NR Desc: At1g08880/F7G19_24
  misc_feature: Homolog of GI Number: 21593507 NR Desc: putative histone H2A
  misc_feature: Homolog of GI Number: 571481 NR Desc: histone H2A
  misc_feature: Homolog of GI Number: 1708102 NR Desc: Histone H2A
  misc_feature: Homolog of GI Number: 121981 NR Desc: Histone H2A
  misc_feature: Homolog of GI Number: 121985 NR Desc: Histone H2A

SEQ ID NO: 9337 - DNA, 1456 bp, Zea mays
  misc_feature: Ceres CLONE ID no. 1509082
  misc_feature: Ceres CDNA ID no. 40041445
  CDS (80)..(1165): REFERENCED BY SEQ ID NO: 9338
aacccgatccccctcattttttttagcggcagcggaatttaactctcgcctctcccgccgccgcccaccgcgcagcccaatggacctccccgtggtggatctcgcgcccttcctgcaggccgccgccggcgacgcggccgcggcgccggccgaggcggaggaggcgctgcgcgcgctctgcgccacggtgagcgccagcctgcgggacacgggggcgctgctggtcaaggacccccgctgcaccgccgccgacaacgaccgcttcctcgacgtcgtcgagcgctacttcgcccgatccgacgactccaagcgcctccaggagcgcccccacctccactaccaggtcggcgtgacacctgaaggcgtggaggtgcctcgcagcctcgtcgacaaggagatgcaagacacgatcaagagtatgccagaggagtttcaaccagccacccctaaggggccagacccgaagtggcggtacatgtggagagtgggccctcgcccgtcgaatacccgctttaaggagctgaacgcagaacctgttattcctgatggattaccggagtggaaagagaccatggattcctggggttcaaaaatgatttctgcaattgaggttgttgctgagatggcggcgattggatttggcttgtcaaaggatgcatttacctctttgatgaaggagggaccgcacctcctagcaccaaccggaagtaatctgatgcgtcatggttttgagggcactgtgtttgctgggttccattatgatcttaatttcttgaccatccatggccgtagtagatttccaggcctgaacatttggttaagtaatggtaaaaagatggaggtgaaggtccctgttggctgtcttctcattcagtcagggaaacagttggaatggcttacaggtggtgaatgtttagctggaatgcatgaggtagtggtgaccaagagaacattagaggcaatagaactagctaaagagcagaaccgaagtttgtggaggatctcatcaacactattctcgcacattgcttccgatgcgacactcaagccattgggccactttgctgaagcacccaatgctcatagttatccacctatatgcgccggggagtatgtggaacaagagctctcagcaattaatctgaaagggaaggttgcactctaggcgcacacagaccgccgattaatctggtgactcgttaatctgccttctgtggtcagaacgcgaattgcgataatccaagctgatacttgtatcttcattcaactttgttgacataccgaggttgcgccggtctatttccgacacaactctatctatgtccatgctaagtatatgtccatttgacccccctgttaagttatagtggatgctcatgctctggtgtactgaactgatagcacctgtgaaaattaaataatagcagtactgttattctcaaaaaaaaaaaaaaaa

SEQ ID NO: 9338 - protein, 361 aa, Zea mays
  misc_feature: Ceres CLONE ID no. 1509082
  misc_feature: Ceres CDNA ID no. 40041445
MDLPVVDLAPFLQAAAGDAAAAPAEAEEALRALCATVSASLRDTGALLVKDPRCTAADNDRFLDVVERYFARSDDSKRLQERPHLHYQVGVTPEGVEVPRSLVDKEMQDTIKSMPEEFQPATPKGPDPKWRYMWRVGPRPSNTRFKELNAEPVIPDGLPEWKETMDSWGSKMISAIEVVAEMAAIGFGLSKDAFTSLMKEGPHLLAPTGSNLMRHGFEGTVFAGFHYDLNFLTIHGRSRFPGLNIWLSNGKKMEVKVPVGCLLIQSGKQLEWLTGGECLAGMHEVVVTKRTLEAIELAKEQNRSLWRISSTLFSHIASDATLKPLGHFAEAPNAHSYPPICAGEYVEQELSAINLKGKVAL

SEQ ID NO: 9339 - DNA, 1170 bp, Zea mays
  misc_feature: Ceres CLONE ID no. 1509321
  misc_feature: Ceres CDNA ID no. 40352014
  CDS (109)..(762): REFERENCED BY SEQ ID NO: 9340
aatttactcccaaaccaagccaaacgaaccagcgccgcagcccgcagcgcacccatcccaccaaacaaacagctagcaggcgaggcgacccgctccgaccgagagccgatgccgacgccgtacagcgcggcggcgctgcagcagcaccaccggctggtctcctcctccggcggcctggcggtggcggcggcgacgggggcacacaggtgcggcgagcacgacgggacggtgccgccggaggtggcgcggcaccacgagcacgcggcgccggggggccgctgctgctgctcggcggtggtgcagcgcgtggcggcgcccgcggcggacgtgtgggccgtggtccggcgcttcgaccagccgcaggcgtacaagagcttcgtgcgcagctgcgcgctgctggacggcgacggcggcgtgggcacgctgcgggaggtgcgcgtggtgtcgggcctccccgcggcgtccagccgggagcggctggagatcctggacgacgagcggcacgtgctgagcttcagcgtggtgggcggcgagcaccggctccgcaactaccggtcggtgaccacggtgcacccggcgccgggggggagcgcgtcggccacgctggtggtggagtcgtacgtggtggacgtgccccccgggaacacccccgaggacacccgcgtgttcgtggacaccatcgtcaagtgcaacctccagtccctcgcccgcaccgccgagaagctcgccggccgaggggcggcctacggcgcgctgccgtgatcgaatcgaatcagaatcgcaaccgcaaccgcaatcgccggcccgtgcctcccctccggtggtcaactcaagcccagcctcggccgcaggggcgtttcggtaaaatcgcgctccgatttccgattaatgaatccaaatccatggtggtggtgcgcgggtggtggcggtcgattatttttctcttgttctttctggcgtgaaggcgaggggtcggtgggtcggttcggttcggtcggcgcgctttcgcagctggcccctcgctgtttctccttatcgcgagacaccccccttgtagtagtgctcctagctctagtcttcgttcgttccccttcgttgttctcggtaagatgataagatttgacaggaattgaggagtaaaaactagcttggacaaaaaaaaaaaaaaaa

SEQ ID NO: 9340 - protein, 217 aa, Zea mays
  misc_feature: Ceres CLONE ID no. 1509321
  misc_feature: Ceres CDNA ID no. 40352014
  misc_feature (67)..(200): Pfam Name: Polyketide_cyc PFAM Desc: Streptomyces cyclase/dehydrase
MPTPYSAAALQQHHRLVSSSGGLAVAAATGAHRCGEHDGTVPPEVARHHEHAAPGGRCCCSAVVQRVAAPAADVWAVVRRFDQPQAYKSFVRSCALLDGDGGVGTLREVRVVSGLPAASSRERLEILDDERHVLSFSVVGGEHRLRNYRSVTTVHPAPGGSASATLVVESYVVDVPPGNTPEDTRVFVDTIVKCNLQSLARTAEKLAGRGAAYGALP

SEQ ID NO: 9341 - DNA, 675 bp, Zea mays
  misc_feature: Ceres CLONE ID no. 1509357
  misc_feature: Ceres CDNA ID no. 36707432
  CDS (278)..(568): REFERENCED BY SEQ ID NO: 9342
atctcgtgattctacacttctaccgttccactctcgtgcgctcttgttttcttctctccgttgccgccctacgtcaggtgcccaattctccattttcgggcccttctccagcgacgagcacccgccaggtacgcccacctctcctcctccgttccttcgccgagcgcccaaaccctagcttaagccatttgcattcggatctgatccaatttcaagtgtactaggtccgatccatctcacccggatcttctgtatctcgggttcttggcagaggattatggattggctggggcagaaacgcgcggagatgctgatgcaggtgctgctggtggcgtctgcggtggtggcgttcctggtgggctacgtgcgcgcggacttccagctcatgctgctcgtctacgccggcggcgtcgtgctcacggctctggtcaccgtccccaactggcctttctacaaccgtaacccgctcaagtggctcgacgctgccgaggccgagcgccacccgcggccccaggtcagcgccgcccccgcggcagggggtaagaagaggtccgggaagaacaagtagttggtcgatgtgtgtgttcttggtcgacctgactcaacctgtttaagatctattcgcagaactaatcaattataaaaagagatattgagataaaaaaaaaaaaaaaa

SEQ ID NO: 9342 - protein, 96 aa, Zea mays; identical to SEQ ID NO: 7028
  misc_feature: Ceres CLONE ID no. 1509357
  misc_feature: Ceres CDNA ID no. 36707432
  misc_feature (1)..(80): Pfam Name: SPC12 PFAM Desc: Microsomal signal peptidase 12 kDa subunit
  misc_feature: Homolog of GI Number: 77555520 NR Desc: microsomal signal peptidase 12 kda subunit
  misc_feature: Homolog of GI Number: 30102562 NR Desc: At4g40042
  misc_feature: Homolog of GI Number: 50754117 NR Desc:  similar to Microsomal signal peptidase 12 kDa subunit
  misc_feature: Homolog of GI Number: 62860158 NR Desc: LOC549392
  misc_feature: Homolog of GI Number: 5138926 NR Desc: HSPC033
  misc_feature: Homolog of GI Number: 73985289 NR Desc:  similar to Microsomal signal peptidase 12 kDa subunit
  misc_feature: Homolog of GI Number: 16905460 NR Desc: signal peptidase 12kDa subunit
  misc_feature: Homolog of GI Number: 61872928 NR Desc:  similar to Microsomal signal peptidase 12 kDa subunit

SEQ ID NO: 9343 - DNA, 785 bp, Zea mays
  misc_feature: Ceres CLONE ID no. 1509458
  misc_feature: Ceres CDNA ID no. 25445846
  CDS (136)..(522): REFERENCED BY SEQ ID NO: 9344
aaaaaagtgttatatatatactcgtccgttgttctctagctactggcgttagagttagagacctgcaggaggagacagagcttaggtgaggaagcaagagcgagagacaagacaacagatcatcagatcggacccatggagctggtggaggccgctgccgcgccggcgacgacgtgctgcgggaggggcgggcggaagctggtgaggtgcccgcgactgcagctggacaccaagacggccacggccatcgagcagtccacgggggagagcatcgccgactccgcggccgccgccgagggcgcgatgcgcgtcaagatcgtgctcagcaagcagcagctcaagcaggtggcggcggccgtcgccgggggcggcagcgccgccttcgccgcgctgccgccggcgctggagcagctcgtgagcgtgctgaggcgccagcacaacgccaagaagcaggctgcggccgggaggcgccggggccggtggtcgccggcgctgcagagcatcccggaggaatgcttttagctaggccgcctgcatgcgtacgtacagtatgtctagtgctctgtactccactccaccgtccgcttgtatagctagggctgccgccagatttccggcctctcttttcttcccgggtcgcaacctgccgattggttgggccaaaatgagcgcccaatggttgcgtaccaaatttgaaatgtcacatattttaatctggcatttgccatttggatccatcgatccaaaaaaaaagttctttgtttatttcaaaaaaaaaaaaaaaa

SEQ ID NO: 9344 - protein, 128 aa, Zea mays
  misc_feature: Ceres CLONE ID no. 1509458
  misc_feature: Ceres CDNA ID no. 25445846
MELVEAAAAPATTCCGRGGRKLVRCPRLQLDTKTATAIEQSTGESIADSAAAAEGAMRVKIVLSKQQLKQVAAAVAGGGSAAFAALPPALEQLVSVLRRQHNAKKQAAAGRRRGRWSPALQSIPEECF

SEQ ID NO: 9345 - DNA, 762 bp, Zea mays
  misc_feature: Ceres CLONE ID no. 1509655
  misc_feature: Ceres CDNA ID no. 25446024
  CDS (50)..(598): REFERENCED BY SEQ ID NO: 9346
acaccaatccttcttcctcacccaacttccggagcaagcgaattgcatcatgcccgcagtgatgaaagctctcgccgccgcctcgccggtctcggcgccgccttcgccccgtcggagcgtcgcaggctcgtcaggtgcgccgtgtcaaagcctgcactcctcattccgcggcatctccctgcggtgccgtcccaggaaaccggcccaccgctcgccgccgctacgcagctcccgggcggcggcgcaggtggtggcgatgaagccggcgatccagttcatccagggcacggacgagcagacgatcccggacgtgcggctgaccaagtcccgcgacggcaccaacggggtagccatcttcgagttcgaccagccgtcggtgttcgactcgtcggcggagctcggggacatcacggggttctacatgatcgacgaggagggcatgctgcagacggtggacgtgagcgccaagttcgtcaacgggaagccggccagggtggaggccaagtacgtgatgcgcacggccggggactgggaccggttcatgaggttcatggagaggtactcgcaggccaacggcctccagttcgtcaagaattaagtcacatctcctcgatgtgccttgtgtgttgcccatgttcagttcagtataactgtcgagctggtaacggaggtgaatgattgtactaaaggtgtcatgtgtatctcttgtgtaactttgacattgtgtgaaattttgtatgcaccataaaaaaaaaaaaaaaa

SEQ ID NO: 9346 - protein, 113 aa, Zea mays
  misc_feature: Ceres CLONE ID no. 1509655
  misc_feature: Ceres CDNA ID no. 25446024
  misc_feature (2)..(113): Pfam Name: PsbW PFAM Desc: Photosystem II reaction centre W protein
  misc_feature: Homolog of GI Number: 57899200 NR Desc: putative photosystem II protein reaction center W
  misc_feature: Homolog of GI Number: 34907246 NR Desc: photosystem II protein W
  misc_feature: Homolog of GI Number: 21592461 NR Desc: photosystem II protein W
  misc_feature: Homolog of GI Number: 7269721 NR Desc: photosystem II protein W
  misc_feature: Homolog of GI Number: 19880501 NR Desc: saline responsive OSSRII protein
  misc_feature: Homolog of GI Number: 3602942 NR Desc: PSII protein W
  misc_feature: Homolog of GI Number: 1185169 NR Desc: PSII
  misc_feature: Homolog of GI Number: 1276813 NR Desc: Photosystem II protein W
  misc_feature: Homolog of GI Number: 1346874 NR Desc: Photosystem II reaction center W protein
  misc_feature: Homolog of GI Number: 45513158 NR Desc: COG1187: 16S rRNA uridine
MKPAIQFIQGTDEQTIPDVRLTKSRDGTNGVAIFEFDQPSVFDSSAELGDITGFYMIDEEGMLQTVDVSAKFVNGKPARVEAKYVMRTAGDWDRFMRFMERYSQANGLQFVKN

SEQ ID NO: 9347 - DNA, 784 bp, Zea mays
  misc_feature: Ceres CLONE ID no. 1509994
  misc_feature: Ceres CDNA ID no. 25446172
  CDS (156)..(359): REFERENCED BY SEQ ID NO: 9348
acttcacacgtagcgcgcagccgcagagtcaccgtctcgcttcgcagtcctactcgcactgtcgcacacacccgtccccatcctcttccggtctcgccctcccctcacgccgctcgccgcgtccggccgcggcaacccgacctgcgtcaatcgccatgactacctcaaggcgtcttgccgataggaagatagcacgatttgagaagaatatcacaaagaggggctctgttcctgagacagtcaagaaggcaaatgattatcctgttggacctattcttcttgggttctttgtcttcgttgttgttggatcatctctctttcagatcatcaagacagcatcaaacgctggtttattctgaggacaattggtcacttacttttagtcactctaaagtcgaggaacagggttgacatatgcagtttgtcacttaaaaactatacaagtgtatggcgtagctggtactctacaatgtcgcctttctaatgctgtaccatggagagttttaagttataatgtatagtccatatatatatatatatgcaatggaagtgctaatttaagtcacttagctgacagggaatacgttcaatccataatacattacatatcgagtaaggtctagtttgagtattctagtattaacctcaattcacatgtattgaggtagtttgatgtgtaatttaaactaatttacacttcaacacatgtggaacatgtggattgaagtctaaagtactcaaacaaagactaaagttatttttatgcccaaaaaaaaaaaaaaaa

SEQ ID NO: 9348 - protein, 67 aa, Zea mays
  misc_feature: Ceres CLONE ID no. 1509994
  misc_feature: Ceres CDNA ID no. 25446172
  misc_feature (1)..(64): Pfam Name: RAMP4 PFAM Desc: Ribosome associated membrane protein RAMP4
  misc_feature: Homolog of GI Number: 25403305 NR Desc: protein F17L21.12
  misc_feature: Homolog of GI Number: 77552122 NR Desc: sorbitol transporter
  misc_feature: Homolog of GI Number: 23479574 NR Desc: Arabidopsis thaliana F17L21.12
MTTSRRLADRKIARFEKNITKRGSVPETVKKANDYPVGPILLGFFVFVVVGSSLFQIIKTASNAGLF

SEQ ID NO: 9349 - DNA, 695 bp, Zea mays
  misc_feature: Ceres CLONE ID no. 1511117
  misc_feature: Ceres CDNA ID no. 25445582
  CDS (102)..(314): REFERENCED BY SEQ ID NO: 9350
aacgggataacgggaggacgacatcacacagccatcgccggccggaagctctcagctctgagcagaaggaggcgggtcgtcacacggtcacacccgtcagcatgagcgaccgcaggtacgggtactcgtacccgccgccccaggggtactacaacaacggaccaccggtgatggcgccgccgccgtaccagtacgcagctcctccaccgccgaggagggagccgagcttccttgaaggatgtctcgccgctctgtgctgctgctgcctcatagacgagtgctgctgcgacccgtcggtcatattcgtgagctgatccggccgcagtccgcagcacatgcatgccaccgtcccagcccaagagacatgtcgcatgcatccgtgtgtgttcgcaatttcgcatgcacttcgcgcctctgttggtgatagatgatgttttttttcctgcctatatgtgtctacgttgaagtacaagcggtgagttgtgcgttcagatctcggggttagagagtttgttggacatggcccgatccagaattccagatgctgatcatggatccggcgcatgtttactgcatatgcacttgtttaagcgcaacgcgacaggatgtatatgtgtgtgtacgaaatcgttgaataacgaaggcaacagacactaatagcatgttccgtttgacgaaaaaaaaaaaaaaaaaaa

SEQ ID NO: 9350 - protein, 70 aa, Zea mays
  misc_feature: Ceres CLONE ID no. 1511117
  misc_feature: Ceres CDNA ID no. 25445582
  misc_feature: Homolog of GI Number: 50919167 NR Desc: unknow protein
  misc_feature: Homolog of GI Number: 8515092 NR Desc: adhesive/proline
  misc_feature: Homolog of GI Number: 50938779 NR Desc: adhesive/proline
  misc_feature: Homolog of GI Number: 50948019 NR Desc: proline
  misc_feature: Homolog of GI Number: 34910048 NR Desc: P0413G02.25
MSDRRYGYSYPPPQGYYNNGPPVMAPPPYQYAAPPPPRREPSFLEGCLAALCCCCLIDECCCDPSVIFVS

SEQ ID NO: 9351 - DNA, 872 bp, Zea mays
  misc_feature: Ceres CLONE ID no. 1511139
  misc_feature: Ceres CDNA ID no. 40352015
  CDS (79)..(651): REFERENCED BY SEQ ID NO: 9352
aacgcggtacgcgcacacagccaaaccatcctcctctccgccgcccgccgcccgccgcagcagcacccaccgggcaagatgaagacgatcctggcgtcggagacgatggacatcccggagggcgtcacggtcacggtggccgccaagctggtcacggtggagggcccccgcggcaagctcacccgcaacttcaagcacctcaacctcgacttccagctgcaggaggccggccgcaagctcaaggtggacgcctggttcggcacccgccgcaccatggccgccatccgcaccgccatctcccacgtccagaacctcatcaagggggtcaccaagggctaccgctacaagatgaggttcgtctacgcccacttccccatcaacgcctccatcaccaacagcaacaccgccatcgagatcagaaacttcctcggcgagaagaaggtcaggaaggtggacatgcttgatggcgtgaccatcctccggtccgagaaggtcaaggatgagctcatccttgacggaaacgacgtcgagctcgtatctcgctccgccgccctcatcaaccagaaatgccatgtgaagaagaaggatatccgaaagtttttggacggtatctatgtgagcgacaagggcgtcatcgaagaggagcagtgagcgacagtgtagccgaaatgccaggagatgaatatgaatgttttgagttgcaattttgcgagactgaatgtgaacctttttctcattccttaaatagttgactgccagtgttcgtgggttcaaacgaaatttagtcttattaactgaatttgcgtattcaaatggattgcgtggctgcctggttatgttttgaaaaaaaaaaagaaaaaaaaaaaaaaaaa

SEQ ID NO: 9352 - protein, 190 aa, Zea mays
  misc_feature: Ceres CLONE ID no. 1511139
  misc_feature: Ceres CDNA ID no. 40352015
  misc_feature (98)..(177): Pfam Name: Ribosomal_L6 PFAM Desc: Ribosomal protein L6
MKTILASETMDIPEGVTVTVAAKLVTVEGPRGKLTRNFKHLNLDFQLQEAGRKLKVDAWFGTRRTMAAIRTAISHVQNLIKGVTKGYRYKMRFVYAHFPINASITNSNTAIEIRNFLGEKKVRKVDMLDGVTILRSEKVKDELILDGNDVELVSRSAALINQKCHVKKKDIRKFLDGIYVSDKGVIEEEQ

SEQ ID NO: 9353 - DNA, 848 bp, Zea mays
  misc_feature: Ceres CLONE ID no. 1511164
  misc_feature: Ceres CDNA ID no. 25447073
  CDS (125)..(682): REFERENCED BY SEQ ID NO: 9354
aaccaccaccacatcctggagcagggcgaggcaacctccgcgccactcgccagctgcccagtcgtctcccacgtcctagcacaacagagcagagctgagcgagcaaaggtatctgccatccaccatggccgtctccatcgccggcagcagcatccgcctccacgttgccccgcccagtcgccgccgcgtcagcgtggtctccgccgccgccgcggcgcggctcgaccggcgctcggcggccctgctcctgctgtccacggcggttccagcagcatcggcagcgacagctcccccagcgagcgccgcgggcatcggtctcttcggcatccgcaagaagctggagcgcgcggaggaggcggcggccgaggcggtgagggaggtggaggaggtggtggaggaggcggcggcggaggccgcggcggtgggcggggaagccgtgaaggaggcggcggccgaggcggtgcgggaggtggaggaggccgcggcggtgggcggggaggccgtgaagggggcggtgacggaggcggagaaggaggtcgccagcgagggcctgcagctggtggccggcgcggagctcgccggggacgggctagtgcaggccgcggtggtcgccggcgccgaggcgctcggggtcgtcgtgggcctatccgtggtaaatggtatcctgaagcccgaggcgtagatggtgtaggctgctgggccttgtagtttcggccgaatacaagtgtttgggctttagcgcttcgttgtcggtgtcgctgtaatttgctgatgacctcttttgtgtgtaaattgttattattatagcaattattggagtgcggataaaagaaaaaaaaaaaaaaaaa

SEQ ID NO: 9354 - protein, 185 aa, Zea mays
  misc_feature: Ceres CLONE ID no. 1511164
  misc_feature: Ceres CDNA ID no. 25447073
  misc_feature: Homolog of GI Number: 51090846 NR Desc: putative glycine
  misc_feature: Homolog of GI Number: 72608016 NR Desc: lipoprotein
  misc_feature: Homolog of GI Number: 67660738 NR Desc: putative lipoprotein
  misc_feature: Homolog of GI Number: 55775280 NR Desc: putative glycine
  misc_feature: Homolog of GI Number: 259443 NR Desc: glycine
  misc_feature: Homolog of GI Number: 27374264 NR Desc: Fib
  misc_feature: Homolog of GI Number: 34898126 NR Desc: putative glycine
  misc_feature: Homolog of GI Number: 567106 NR Desc: RNA binding protein
  misc_feature: Homolog of GI Number: 17647425 NR Desc: CG9888
  misc_feature: Homolog of GI Number: 9453857 NR Desc: EBNA
MAVSIAGSSIRLHVAPPSRRRVSVVSAAAAARLDRRSAALLLLSTAVPAASAATAPPASAAGIGLFGIRKKLERAEEAAAEAVREVEEVVEEAAAEAAAVGGEAVKEAAAEAVREVEEAAAVGGEAVKGAVTEAEKEVASEGLQLVAGAELAGDGLVQAAVVAGAEALGVVVGLSVVNGILKPEA

SEQ ID NO: 9355 - DNA, 922 bp, Zea mays
  misc_feature: Ceres CLONE ID no. 1511405
  misc_feature: Ceres CDNA ID no. 36592228
  CDS (99)..(623): REFERENCED BY SEQ ID NO: 9356
aaccgagcagcaacaagccaacaactaaaggcaggcgcggcacaccgcgacaccgtaccggcctagacacttggagaaaggagaagcagcgcagcggcatgggcaccagtcccgtcatccctgcgacgatgctcgtcgtcgctctccttgtcgctagtagtactgtctgcttcggcgccaccgccaccgacaccgacaccgacggcgccattcgtctccccagcagctctggtgctgttggtcgaccgtgggagtgctgtgactatgtcaccaaggagccgtttatcaggccgccccggtggcgctgcaacgacgtggtggacaagtgctccgccgactgccaagagtgcgaggagtcgccggccggcgacggcttcgtctgccgtgactggatcttcagcctgctcgagcccccggtctgcacacccaggccgtgggactgctgcgacttcgccgtctgcacaagggactacatcccctactgccagtgcggcgacgtggtggagtcgtgccccagcaactgcaaagcgtgcaagcttgtggagtcggaccctcctcgctaccgatgcctagacgtcttccacggctatcctggtcccaagtgcacgccatggatcagttagagcaattagctcagctcagctacttgctaaataaataaataaaagtagcgcagctcagctacttgctagtacgtagtacgtccacaataaataaataaaagcggctagcgaacaaagctaacacctgtttgttcgtcccgagtcccgacactctttcgcgcaatcgcgcgtcattaaatataaataataactagctatatacccgtgcgttgcaacgggggacacttgtttacacataggtcattgtttagtgataatatcaagaatcaactcaacaatcataaaaaaaaaaaaaaaaa

SEQ ID NO: 9356 - protein, 174 aa, Zea mays
  misc_feature: Ceres CLONE ID no. 1511405
  misc_feature: Ceres CDNA ID no. 36592228
  misc_feature (53)..(78): Pfam Name: Bowman PFAM Desc: Bowman
  misc_feature: Homolog of GI Number: 3264598 NR Desc: trypsin inhibitor
  misc_feature: Homolog of GI Number: 55769973 NR Desc: putative Bowman Birk trypsin inhibitor
  misc_feature: Homolog of GI Number: 34895496 NR Desc: putative Bowman Birk trypsin inhibitor
  misc_feature: Homolog of GI Number: 7635923 NR Desc: putative Bowman Birk tryspin inhibitor
  misc_feature: Homolog of GI Number: 34895446 NR Desc: putative Bowman Birk tryspin inhibitor
  misc_feature: Homolog of GI Number: 7635919 NR Desc: putative Bowman Birk trypsin inhibitor
  misc_feature: Homolog of GI Number: 34895448 NR Desc: putative Bowman Birk trypsin inhibitor
  misc_feature: Homolog of GI Number: 55769985 NR Desc: putative Bowman Birk trypsin inhibitor
  misc_feature: Homolog of GI Number: 34895434 NR Desc: putative Bowman Birk trypsin inhibitor
  misc_feature: Homolog of GI Number: 55769975 NR Desc: putative Bowman Birk trypsin inhibitor
MGTSPVIPATMLVVALLVASSTVCFGATATDTDTDGAIRLPSSSGAVGRPWECCDYVTKEPFIRPPRWRCNDVVDKCSADCQECEESPAGDGFVCRDWIFSLLEPPVCTPRPWDCCDFAVCTRDYIPYCQCGDVVESCPSNCKACKLVESDPPRYRCLDVFHGYPGPKCTPWIS

SEQ ID NO: 9357 - DNA, 659 bp, Zea mays
  misc_feature: Ceres CLONE ID no. 1511496
  misc_feature: Ceres CDNA ID no. 25446173
  CDS (94)..(480): REFERENCED BY SEQ ID NO: 9358
aagaagaaacttacgaggatcccccctagaaaaaagcgagcgagagcagcacacactgcacgcagctagctaggagcagcagcagcggcggcgatggcggcctccatgatctcctcgtcagctctggcggtggcgcctcagggcctgccgcccctcggccgccgcgcctcctccttcgccgtcgtctgctccaagaagaagatcaagaccgacaagccctacgggattgggggtggcctgaccgtcgacgtcgacgccaacgggagaaagggcaagggcaagggcgtgtaccagttcgtcgacaagtacggcgcgaacgtcgacggatacagcccaatctacaacgaggatgactggtctcccaccggcgacgtctacgtcggtggaaccactgggcttctgatctgggccgtcaccctcgctgggatcctcggcggcggcgccctcctcgtctacaacaccagcgccctctccggctaaggatatccaatgcatgcgcttcttgcgattcgtcatgtaaaatcagggtgtctgtctataatctagcctccatggatgctcaaccttcgtcatgtaacaataatcagtgctactcttcattacataattttgatgctatatatatataccccatccctccctaaaaaaaaaaaaaaaaa

SEQ ID NO: 9358 - protein, 124 aa, Zea mays
  misc_feature: Ceres CLONE ID no. 1511496
  misc_feature: Ceres CDNA ID no. 25446173
  misc_feature (29)..(124): Pfam Name: PsbR PFAM Desc: Photosystem II 10 kDa polypeptide PsbR
  misc_feature: Homolog of GI Number: 50942069 NR Desc: putative photosystem II 10K protein
  misc_feature: Homolog of GI Number: 1835731 NR Desc: photosystem II 10 kDa polypeptide
  misc_feature: Homolog of GI Number: 83776786 NR Desc: chloroplast photosystem II 10 kDa protein
  misc_feature: Homolog of GI Number: 22669 NR Desc: NtpII10
  misc_feature: Homolog of GI Number: 1217642 NR Desc: PSII polypeptide
  misc_feature: Homolog of GI Number: 21489 NR Desc: ST
  misc_feature: Homolog of GI Number: 25989650 NR Desc: photosystem II 10 kDa protein
  misc_feature: Homolog of GI Number: 81471 NR Desc: photosystem II 10K protein precursor
  misc_feature: Homolog of GI Number: 1418984 NR Desc: photosystem II 10 kD polypeptide
  misc_feature: Homolog of GI Number: 33694227 NR Desc: 10 kDa photosystem II polypeptide
MISSSALAVAPQGLPPLGRRASSFAVVCSKKKIKTDKPYGIGGGLTVDVDANGRKGKGKGVYQFVDKYGANVDGYSPIYNEDDWSPTGDVYVGGTTGLLIWAVTLAGILGGGALLVYNTSALSG

SEQ ID NO: 9359 - DNA, 817 bp, Zea mays
  misc_feature: Ceres CLONE ID no. 1511556
  misc_feature: Ceres CDNA ID no. 40352016
  CDS (180)..(554): REFERENCED BY SEQ ID NO: 9360
ctaggccagcagacttgcaaataacatttttgtttgatgttggacaaaggttaaggtacggatgccaatatccaggcatctgtaaataatcatctgatgttgcttgctaattgtggcaggttggtgtcacacactacttttcgttcttgaaagctagagaggagctcggctacgtgcccatggtgaggccccacgaaggcttagccgcaacgatctcgtactggcaagagcggaagagaagggagctggatggcccgaccatattcacttggctggccgtaacgatcgggatgctggccgtgttttctgctgcctgcctcccggcagtcggcccgttgaaatgggtgctcgacgtgcacctgtttgttttccgctcgatgctcgtgatccggctggtcttggtggtagcgatcgcactgcatgctggcgaagccgtgtacgcctggttcttggcgagaagggttgacccgaggaacgctgccgggtggttctggcagaccttcgctctggggtacttctccctccggtaccttctcaagagaggcagagcgtgaattcgtgtttggttcacgtgtacgtacactgcggatcctgtaacagtggttccaacttccaagcttcatgcttggtttttattgaggaggcgtcaggcgtatgagcatccccagatcgtatccctcctgacatgcaacggagaggcctgtggtcggatgtactttgtggtgatgctgtgaactggtgaaagtttaacaggtcgctttcttggatgagctgtaatgtaactagccattgttagatccaaaaaaaaaaaaaaaaa

SEQ ID NO: 9360 - protein, 124 aa, Zea mays
  misc_feature: Ceres CLONE ID no. 1511556
  misc_feature: Ceres CDNA ID no. 40352016
MVRPHEGLAATISYWQERKRRELDGPTIFTWLAVTIGMLAVFSAACLPAVGPLKWVLDVHLFVFRSMLVIRLVLVVAIALHAGEAVYAWFLARRVDPRNAAGWFWQTFALGYFSLRYLLKRGRA

SEQ ID NO: 9361 - DNA, 806 bp, Zea mays
  misc_feature: Ceres CLONE ID no. 1512206
  misc_feature: Ceres CDNA ID no. 36699047
  CDS (101)..(586): REFERENCED BY SEQ ID NO: 9362
actctcctccttcctccaccgccgccaacgtcgcctggcggccgtctgcagctccgcgcctctgctcggaagttggtgaaggtttcttgaagctgagaagatggtgctgaagacagaactctgccgcttcagcggccagaagatttatcctgggaaaggcatccgatttatccgtgctgattctcaggttttcctttttgccaactcaaaatgcaagcgctacttccacaaccgcctgaagcctgcaaagcttacctggacagcaatgtacaggaagcagcacaagaaggatatccatgctgaggctgtcaagaagaggcgccgcgccaccaagaagccatactcgaggtccattgtgggtgcttccctagaggtgatccaggagaagagggctgagaagcccgaggtccgcgatgctgctagagaagctgctcttcgtgagatcaaggagcgcatcaagaagaccaaggatgagaagaaggcgaaaaaggctgaggtgaccaagtcccagaaggcacagacgaagggagcggtccagaagggttccaagggccccaagttgggtggtggcggtggcaagcgctgaaagaacctaagtgtcgttccttgaccttgcaattgctcctccatagcccaccttgttgcaccaacgccacttttgtagtacctcggttaattttgcattttctttcagagttgtttgtgggttttgagttccatctcaagagagttgagtttatttatctttatattgggtgaaatgttcatatgctttcctcagcttggatgaaaaaaaaaaaaaaaaa

SEQ ID NO: 9362 - protein, 161 aa, Zea mays
  misc_feature: Ceres CLONE ID no. 1512206
  misc_feature: Ceres CDNA ID no. 36699047
  misc_feature (3)..(73): Pfam Name: Ribosomal_L24e PFAM Desc: Ribosomal protein L24e
  misc_feature: Homolog of GI Number: 50931851 NR Desc: putative 60S ribosomal protein L24
  misc_feature: Homolog of GI Number: 1154859 NR Desc: L24 ribosomal protein
  misc_feature: Homolog of GI Number: 56785063 NR Desc: putative 60S ribosomal protein L24
  misc_feature: Homolog of GI Number: 34900364 NR Desc: putative 60S ribosomal protein L24
  misc_feature: Homolog of GI Number: 2961300 NR Desc: ribosomal protein L24
  misc_feature: Homolog of GI Number: 10180025 NR Desc: 60S ribosomal protein L24
  misc_feature: Homolog of GI Number: 21553461 NR Desc: 60S ribosomal protein L24
  misc_feature: Homolog of GI Number: 30102870 NR Desc: At3g53020
  misc_feature: Homolog of GI Number: 82400154 NR Desc: ribosomal protein L24
  misc_feature: Homolog of GI Number: 25295112 NR Desc: 60S ribosomal protein L24
MVLKTELCRFSGQKIYPGKGIRFIRADSQVFLFANSKCKRYFHNRLKPAKLTWTAMYRKQHKKDIHAEAVKKRRRATKKPYSRSIVGASLEVIQEKRAEKPEVRDAAREAALREIKERIKKTKDEKKAKKAEVTKSQKAQTKGAVQKGSKGPKLGGGGGKR

SEQ ID NO: 9363 - DNA, 704 bp, Zea mays
  misc_feature: Ceres CLONE ID no. 1513308
  misc_feature: Ceres CDNA ID no. 25446174
  CDS (72)..(560): REFERENCED BY SEQ ID NO: 9364
actagaaaaaattcactcgccgccccagttccccaccccctgctcacccacccgtcccctcctgctcgcccatggctcccatcgctgtcggcgacgccctccccgacggccagctcgggtggttcgacgagaacgaccagctgcagcaggtctccgtccacgcgctcgccgccggcaagaaggtcatcctcttcggcgtccccggcgccttcaccccgacctgcagcaaccagcatgtgccaggcttcatcacacaggctgagcagctcaaagccaagggtgtagacgagatcctgcttatcagcgttaacgaccccttcgtcatgaaggcgtgggcgaagacctaccccgagaacaagcacgtgaagttcctcgccgacggatctggagcgtacaccaaggcgctcgacctcgagctcgatctcacggacaaaggtctgggcgtgcgctcgaagaggttcgctctcctggccgacgacctcacggtcaccgtcgcaaacatcgaggaaggcgggcagttcacgatctctggcgctgaggagatcctgaaggcgctttagaagccgcagcaacgatcggtctagtttgaactcgcctttgaataacttgtcgttggacaaggtctagttcggtgttgtgtatggaacggtcgtcactgagtcatgcacgatttggtatccgtggttcaaaaaaaaaaaaaaaaa

SEQ ID NO: 9364 - protein, 162 aa, Zea mays
  misc_feature: Ceres CLONE ID no. 1513308
  misc_feature: Ceres CDNA ID no. 25446174
  misc_feature (6)..(160): Pfam Name: AhpC PFAM Desc: AhpC/TSA family
  misc_feature: Homolog of GI Number: 34911078 NR Desc: peroxiredoxin
  misc_feature: Homolog of GI Number: 4928472 NR Desc: type 2 peroxiredoxin
  misc_feature: Homolog of GI Number: 12083336 NR Desc: putative type 2 peroxiredoxin protein
  misc_feature: Homolog of GI Number: 12083334 NR Desc: putative type 2 peroxiredoxin protein
  misc_feature: Homolog of GI Number: 52851172 NR Desc: thioredoxin
  misc_feature: Homolog of GI Number: 18654477 NR Desc: thioredoxin peroxidase
  misc_feature: Homolog of GI Number: 30841938 NR Desc: thioredoxin peroxidase 1
  misc_feature: Homolog of GI Number: 21593881 NR Desc: type 2 peroxiredoxin
  misc_feature: Homolog of GI Number: 19548660 NR Desc: peroxiredoxin
  misc_feature: Homolog of GI Number: 51535721 NR Desc: putative thioredoxin peroxidase 1
MAPIAVGDALPDGQLGWFDENDQLQQVSVHALAAGKKVILFGVPGAFTPTCSNQHVPGFITQAEQLKAKGVDEILLISVNDPFVMKAWAKTYPENKHVKFLADGSGAYTKALDLELDLTDKGLGVRSKRFALLADDLTVTVANIEEGGQFTISGAEEILKAL

SEQ ID NO: 9365 - DNA, 524 bp, Zea mays
  misc_feature: Ceres CLONE ID no. 1513722
  misc_feature: Ceres CDNA ID no. 35383444
  CDS (1)..(330): REFERENCED BY SEQ ID NO: 9366
aatacccatcccattccccacaaggctccgtcccttcggcggcggcgatgtctctcccccctggcccggcggacagtggcgccggcaccggagacgactggttcctcgactgcggcatcctcgacgacctgcccgccgcggcctgcggggccttcccgtgggacgcgtccccgtcgtcttccaaccccaggtccgcccagatcgaccgaccgattcctcccttccccacgccacctcctagttccggaaggcacggatgctttgtttggcgtacggtcccgtgaccccggcgttccgtatctttgcgatgagtatattgtggaatcgtgacgggcggatgaattgttttggggatttgggctgtgtagtagtctactagatgcatgcgcgtggaggcgtctgatccgtagaggtggtttctttacacagcggatcttccagtctgttgctcgtgctataaacctgccgaggctgcttttgtacaggttaaattagattagagttcccaaaaaaaaaaaaaaaaa

SEQ ID NO: 9366 - protein, 78 aa, Zea mays
  misc_feature: Ceres CLONE ID no. 1513722
  misc_feature: Ceres CDNA ID no. 35383444
  misc_feature: Homolog of GI Number: 50940947 NR Desc: helix
MSLPPGPADSGAGTGDDWFLDCGILDDLPAAACGAFPWDASPSSSNPRSAQIDRPIPPFPTPPPSSGRHGCFVWRTVP

SEQ ID NO: 9367 - DNA, 613 bp, Zea mays
  misc_feature: Ceres CLONE ID no. 1513774
  misc_feature: Ceres CDNA ID no. 25446175
  CDS (97)..(282): REFERENCED BY SEQ ID NO: 9368
acccgttcctcacgccgcctccacgcctccaacagaagaaccctaagctgccctcgctccgacgccgccacctcgtcgtccgaccgcatcgattcgatggcccgcatctccgccgtcgttgccgccgtgatcaccgccgccgttgtcgttgacgcgctgttcacagccgcctccgccaccgaggcaccggcccccgccccgatgtccggcgcgggcgccctctcagcgcagctctccgtcggctgcctcgcggcgctcctcgccgctttcctccgccactgagcggtgaggccgccccgtctgcgtgcgcgtcttcagatctagtggtacagtggtagtgagagttgcagtctaatgttagtcgcaggtatcgtagcggtggtgatagtgttatgaagatgaggcatttggttttgttccacgtggtgggtggatggatgaatctgggcgtttggagagttttttcattttgatgctggatttgatttagtatgattggtgttagtttattactattattatttattatgtgcgtttctgtacctactgctcaccggctacgagggattattattatggatttatgatgttttatgtaaaaaaaaaaaaaaaa

SEQ ID NO: 9368 - protein, 61 aa, Zea mays
  misc_feature: Ceres CLONE ID no. 1513774
  misc_feature: Ceres CDNA ID no. 25446175
  misc_feature: Homolog of GI Number: 1405821 NR Desc: SULFATED SURFACE GLYCOPROTEIN 185
  misc_feature: Homolog of GI Number: 34914094 NR Desc: B1064G04.26
  misc_feature: Homolog of GI Number: 21992 NR Desc: extensin
  misc_feature: Homolog of GI Number: 76262500 NR Desc: pherophorin
  misc_feature: Homolog of GI Number: 28574875 NR Desc: CG13731
  misc_feature: Homolog of GI Number: 76262498 NR Desc: pherophorin
  misc_feature: Homolog of GI Number: 13265426 NR Desc: At2g14890
MARISAVVAAVITAAVVVDALFTAASATEAPAPAPMSGAGALSAQLSVGCLAALLAAFLRH

SEQ ID NO: 9369 - DNA, 797 bp, Zea mays
  misc_feature: Ceres CLONE ID no. 1513793
  misc_feature: Ceres CDNA ID no. 40352017
  CDS (200)..(667): REFERENCED BY SEQ ID NO: 9370
aatccagtcgcatctccctctccgaaatcaaggtagcgtacaccgctgcagtttctagagccctctctgccactcgtgatcccactagtcacaatgcctgccctcgccaagcccgcctcccgcggctccgaagccgaagcctgccgccgccaagccgaaggcggccaccgctggtgcctcccacccgccttacttcgagatgatcaaggaggctatcacggcgctcaaggagaggaccggctccagctcgcaagcgatcgccaagtatgtgggggacaagcacggcgcgtctctgccggccaacttcaagaagatgctttccatccagctccgtgggtccgcagccaagggcaagctcgtgaaggtcaaggcttcgtacaagctctcggacgccgccaagaaggcatcccccaagaccaaggctaagccggcaaaggccgccgctgccaagaccaccgcccccaagccggccaaggccgccgccgccaagtcaaagaaggcagcggctgccaagccaaagaaggccgctgctgctgggaccaagcgcaaagtgcccgagaagaaggtcgtggcgaagccgaagaagtcccccgccgccaaggccaaggccaagccgaagaccgtgaagtcccctgcctccaagaaggcacggaaggcctccgcatgagatgggttgctttaggtctaagctctgattgtggttggtgtcagttaggtactgtacaaactaagtgtgtgcccaaagtgtctcaggcggtgtgttatgtgcttagcaagttctatctaaaaaaaaaaaa

SEQ ID NO: 9370 - protein, 155 aa, Zea mays
  misc_feature: Ceres CLONE ID no. 1513793
  misc_feature: Ceres CDNA ID no. 40352017
  misc_feature (1)..(64): Pfam Name: Linker_histone PFAM Desc: linker histone H1 and H5 family
MIKEAITALKERTGSSSQAIAKYVGDKHGASLPANFKKMLSIQLRGSAAKGKLVKVKASYKLSDAAKKASPKTKAKPAKAAAAKTTAPKPAKAAAAKSKKAAAAKPKKAAAAGTKRKVPEKKVVAKPKKSPAAKAKAKPKTVKSPASKKARKASA

SEQ ID NO: 9371 - DNA, 770 bp, Zea mays
  misc_feature: Ceres CLONE ID no. 1513834
  misc_feature: Ceres CDNA ID no. 25445973
  CDS (69)..(431): REFERENCED BY SEQ ID NO: 9372
aaccaaagcctccgcccccttccctgacaccctcgccgccgcgcacgcacgcacgaaccagcgaagagatgggcgtctacaccttcgtgtgccgcagcgccggcggcggcgagtggaccgccaagcagcactccggcgagatggaggcctccgccgccaccccctacgagctgcagcgccgcctcgtcgccgccgcctccgcggccgactccgcgtccggcgtccagtcgtccttctccatggtcacccccagctccgccgtcttccaggtgatcgtcggtggtggcgcgatgatggttagtggcggcggcggcggcggtgcggccgccgccgcgtcgggtggcgctgcggccgaagctcccaaggaggagaagaaggaagaggagaaggaagagagcgacgacgacatgggattctccctgttcgactagagttaagctgcgtgtgcatggttgcggttcggtcgtgtcgcgcgaaacgtgaagagctcaagcggcctttttgttccagtcccacatgtgagagctttgatacgttgtctggaatgaaaaaatttccccttgacaccttgtctgcaccgagggaggagtaggcgtgggggaaaaactgtagaacctgtgggatgcaaaatctatctagtctagttttgggatcggttacgaatttgtcttcaacaaatagtttggatgagacgagtggaaaacatgggtggtgttgatttcagaaacgaatggcgatatgacatgtgttgtggcaaaaaaaaaaaaaaa

SEQ ID NO: 9372 - protein, 120 aa, Zea mays
  misc_feature: Ceres CLONE ID no. 1513834
  misc_feature: Ceres CDNA ID no. 25445973
  misc_feature (68)..(119): Pfam Name: Ribosomal_60s PFAM Desc: 60s Acidic ribosomal protein
  misc_feature: Homolog of GI Number: 7489709 NR Desc: acidic ribosomal protein P3a
  misc_feature: Homolog of GI Number: 53792736 NR Desc: putative 60S acidic ribosomal protein P3
  misc_feature: Homolog of GI Number: 56783875 NR Desc: putative acidic ribosomal protein P3a
  misc_feature: Homolog of GI Number: 20259603 NR Desc: putative acidic ribosomal protein
  misc_feature: Homolog of GI Number: 21617903 NR Desc: 60S acidic ribosomal protein P3
  misc_feature: Homolog of GI Number: 6226017 NR Desc: 60S acidic ribosomal protein P3
  misc_feature: Homolog of GI Number: 38503544 NR Desc: 60S acidic ribosomal protein P3
  misc_feature: Homolog of GI Number: 38503536 NR Desc: 60S acidic ribosomal protein P3
  misc_feature: Homolog of GI Number: 38503547 NR Desc: 60S acidic ribosomal protein P3
  misc_feature: Homolog of GI Number: 24266974 NR Desc: ribosomal protein P1
MGVYTFVCRSAGGGEWTAKQHSGEMEASAATPYELQRRLVAAASAADSASGVQSSFSMVTPSSAVFQVIVGGGAMMVSGGGGGGAAAAASGGAAAEAPKEEKKEEEKEESDDDMGFSLFD

SEQ ID NO: 9373 - DNA, 671 bp, Zea mays
  misc_feature: Ceres CLONE ID no. 1513872
  misc_feature: Ceres CDNA ID no. 25446176
  CDS (85)..(471): REFERENCED BY SEQ ID NO: 9374
aaacgctctccgccgccacttctcctccggcatcgacgaggcgaagccccagcgcccgagtccctctccctgctcccacgacccatggcggcggatatggcgtacgcgccgccgatgaaggcgggcaaggccgggttcgaggctggcatgatggatccgcagcacaggatccgcatcacgctctcctccaagagcgtcaagaacctcgagaaagtctgcggggatctggtgaagggcgccaagggtaaggagctcaaggtcaagggccccgtgcggatgcctaccaaggtgctccacatcaccaccaggaagtctccctgtggagaaggtaccaacacctgggatcgctttgagatgaggattcacaagagggtgatcgatctcgtcagtacaccagacgttgtcaagcagatcacctcgatcactattgaaccaggtgtcgaggttgaggtgactatcagtgacgcttaatatggtagccttatcatttcaaaaggcttctagtgaacaggatattttcaattcctagtgagaacttgtgtaacagaggaatccaagtatttcatatcaaagttaaaaagtcttatcgagggttcgcggtatggatgtatcctgtttcaaatgatttcccctaatgtatgaatgaaaacggtcaaaaaaaaaaaaaaaaa

SEQ ID NO: 9374 - protein, 118 aa, Zea mays; identical to SEQ ID NO: 866
  misc_feature: Ceres CLONE ID no. 1513872
  misc_feature: Ceres CDNA ID no. 25446176
  misc_feature: The plant flowers significantly late compared to wild-type.
  misc_feature: The plant is abnormally large.
  misc_feature: null
  misc_feature: Useful for making plants with modulated biomass
  misc_feature: Useful for making plants with modulated flowering time
  misc_feature: Useful for making plants with modulated phosphate use efficiency
  misc_feature (18)..(113): Pfam Name: Ribosomal_S10 PFAM Desc: Ribosomal protein S10p/S20e
  misc_feature: Homolog of GI Number: 55775376 NR Desc: 40S subunit ribosomal protein
  misc_feature: Homolog of GI Number: 50933555 NR Desc: 40S ribosomal protein S20
  misc_feature: Homolog of GI Number: 31430421 NR Desc: putative ribosomal protein S10p/S20e
  misc_feature: Homolog of GI Number: 21617905 NR Desc: 40S ribosomal protein S20
  misc_feature: Homolog of GI Number: 21281054 NR Desc: putative 40S ribsomomal protein
  misc_feature: Homolog of GI Number: 23198348 NR Desc: 40S ribosomal protein S20
  misc_feature: Homolog of GI Number: 54208698 NR Desc: ribosomal protein S10p/S20e
  misc_feature: Homolog of GI Number: 22203726 NR Desc: ribosomal protein S20
  misc_feature: Homolog of GI Number: 40643004 NR Desc: ribosomal protein S20
  misc_feature: Homolog of GI Number: 20805825 NR Desc: ribosomal protein S20
  misc_feature: Useful for making shorter plants
  misc_feature: Useful for sterility
  misc_feature: Useful for sterility

SEQ ID NO: 9375 - DNA, 731 bp, Zea mays
  misc_feature: Ceres CLONE ID no. 1513882
  misc_feature: Ceres CDNA ID no. 25446177
  CDS (129)..(530): REFERENCED BY SEQ ID NO: 9376
aatccgactcggttacaacagtccacatcccatcagttcatccgctagggttttagcccggtaccccgaatcccgctcctccgccgcctcgcgtccaccctttctcttggcgcgctccgatccaagagatggcggtgccgctgctgacaaagaagatcgtgaagaagcgggtcaagcagttcaagaggccccatcttgaccgctataagtgccttaagccaagctggcgcaggccaaagggtattgactcccgtgtcaggaggaagttcaagggatgcaccttgatgcccaacattggttacggctctgacaaatcaaccaggcactacctccccaacaagttcaagaagtttgtggtgcacaatgtctctgagctggagttgctcatgatgcacaacagaacctactgtgccgagatcgcccacaacgtttcaaccaagaagcgcaaggagattgttgaacgcgccgcgcagctcgacattgtggtcaccaacaagctcgccaggctccgcagccaggaggatgagtagtctggtttcttgtcataacggccaactagatcctgccattcccggctgtaggaaactactctgctttgtgcgttgttagtacttagtataccagacattttctacatttttggtaccagtagcgaattcaatgtggcatattctactgttatcttgcgtcttaattacctgcacctcatgttttaaaaaaaaaaaaaaaaa

SEQ ID NO: 9376 - protein, 133 aa, Zea mays; identical to SEQ ID NO: 6698
  misc_feature: Ceres CLONE ID no. 1513882
  misc_feature: Ceres CDNA ID no. 25446177
  misc_feature (14)..(123): Pfam Name: Ribosomal_L32e PFAM Desc: Ribosomal protein L32
  misc_feature: Homolog of GI Number: 50947773 NR Desc: putative ribosomal protein L32
  misc_feature: Homolog of GI Number: 76057835 NR Desc: ribosomal L32
  misc_feature: Homolog of GI Number: 71534997 NR Desc: ribosomal protein L32
  misc_feature: Homolog of GI Number: 13899057 NR Desc: ribosomal protein L32
  misc_feature: Homolog of GI Number: 40287540 NR Desc: ly200 protein
  misc_feature: Homolog of GI Number: 77745481 NR Desc: ly200
  misc_feature: Homolog of GI Number: 23198054 NR Desc: ribosomal protein L32
  misc_feature: Homolog of GI Number: 21555143 NR Desc: ribosomal protein L32
  misc_feature: Homolog of GI Number: 10177580 NR Desc: ribosomal protein L32
  misc_feature: Homolog of GI Number: 31241003 NR Desc: ENSANGP00000017702

SEQ ID NO: 9377 - DNA, 748 bp, Zea mays
  misc_feature: Ceres CLONE ID no. 1513950
  misc_feature: Ceres CDNA ID no. 25446178
  CDS (171)..(554): REFERENCED BY SEQ ID NO: 9378
aattattcgttgcagtagtcgcagctgacggacgactgaaccaccgacagacaacatggccgcctccgcctccaccgtctccggcctcgccggcgcctccctggccagccgcccggcgttctccaccagtacgctccccgttttcattcctttgaacaagtagtgcagaaatgcaccttcttgcttcttgttgcttcacgcggggcagccgggtgtcggcgaggaaccccctgatgagcaggaacctggagaggaatggcaggatcacctgcatgacgtttccccgggactggctgcggagggacctgagcgtcatcggcttcgggctcatcggctggatggggccgtccagcgtcccggccatcaacggcaacagcctcacggggctcttcttctccagcatcggccaggagctggcccacttccccacgcccccgcccgtcacctcccagttctggctgtggctagtgacatggcacctgggcctgttcatcgtgctcaccttcggccagatcggattcaagggcaggaccgaggactatttcgagaagtgaagcggttatgatcggatccatcatcgctggtgctgcgttgcgtgcgtgcctgccgcaatcgaacctttgctgtgtatagggttccgatttcgtggaatgtacgatgctacttttgaccttcaatgtaaaatctatgccgcccggccccaacgcgctctgctttaatttgatgcatccaaaaaaaaaaaaaaaaa

SEQ ID NO: 9378 - protein, 127 aa, Zea mays
  misc_feature: Ceres CLONE ID no. 1513950
  misc_feature: Ceres CDNA ID no. 25446178
  misc_feature: Homolog of GI Number: 50924111 NR Desc: OJ991214_12.3
  misc_feature: Homolog of GI Number: 6996562 NR Desc: putative 16kDa membrane protein
  misc_feature: Homolog of GI Number: 57335320 NR Desc: photosystem I subunit O precursor
MHLLASCCFTRGSRVSARNPLMSRNLERNGRITCMTFPRDWLRRDLSVIGFGLIGWMGPSSVPAINGNSLTGLFFSSIGQELAHFPTPPPVTSQFWLWLVTWHLGLFIVLTFGQIGFKGRTEDYFEK

SEQ ID NO: 9379 - DNA, 768 bp, Zea mays
  misc_feature: Ceres CLONE ID no. 1514333
  misc_feature: Ceres CDNA ID no. 25402977
  CDS (275)..(571): REFERENCED BY SEQ ID NO: 9380
aaaaaaaaaaaaaaaaaaaaaaaaaaaaaaaaaaaaaaaaaacgcgaatcctccaatctgtccttgccgccgccgcccgatccaggtctgcagactgctcacttctccccacccaacgcggcggcactccttctccctccccgagtgcctgctgtgcgcctgtacttcacaccggcgtcgccccctcctccagaactccccaccggagccaccctcacccgtcacgcactcctccgctgagtgcagcaagtgctgatcagtgggtggacgggagatggtgctgaggcgggcggcaaccgaatgccccaagaaggttgcggggctgaaggatctggtgaacctgccaacccagctgcgagagttcgccggaggccggtcccaaatgtcacatatctccttcttcctcagtgtctggtcgtacatcaaggacaacaaacttcaggacccaacgaataagaacattgtgaagtgtgatgagaagctgaagaccgtattattgggcaggtccaaagtgcaactgtctgaactcccaatgattgttaagctccatttcccaaaattgccaaagtagtgacaacatagtattgtatattgaagttctgtgggaccccctacagtaacttttacttcaaaaaaaaaagttctgtgggaacatgataggatagatagaacactatatgtattgttttgctgaaatttccatttactgtctgtatgtactggagcgatctatacatcgagcataccgattaaaaaaaaaaaaaaaaa

SEQ ID NO: 9380 - protein, 98 aa, Zea mays
  misc_feature: Ceres CLONE ID no. 1514333
  misc_feature: Ceres CDNA ID no. 25402977
  misc_feature (17)..(94): Pfam Name: SWIB PFAM Desc: SWIB/MDM2 domain
  misc_feature: Homolog of GI Number: 50726534 NR Desc: SWIB complex BAF60b domain
  misc_feature: Homolog of GI Number: 77555897 NR Desc: SWIB/MDM2 domain
  misc_feature: Homolog of GI Number: 50905011 NR Desc: putative SWIb domain
  misc_feature: Homolog of GI Number: 33667910 NR Desc: SWIb domain
MVLRRAATECPKKVAGLKDLVNLPTQLREFAGGRSQMSHISFFLSVWSYIKDNKLQDPTNKNIVKCDEKLKTVLLGRSKVQLSELPMIVKLHFPKLPK

SEQ ID NO: 9381 - DNA, 563 bp, Zea mays
  misc_feature: Ceres CLONE ID no. 1514797
  misc_feature: Ceres CDNA ID no. 36706817
  CDS (102)..(380): REFERENCED BY SEQ ID NO: 9382
aagcatccacaattccacataacctcgcccgcgccgcctcccccacgagacgccttcttgctctcgcttccggtgacgcccgccacttcctccccgacgagatgacgaaacgcaccaagaaggcaggaatcgttggcaaatatggtaccaggtatggtgccagtttacgtaaacagatcaagaagatggaggtctcgcagcactccaaatacttctgtgagttctgtggcaagtttgccgtgaagaggaaagcagttggtatctggggatgcaaggactgtgggaaggttaaggccggtggcgcctacacaatgaacactgctagtgcggtcactgtgagaagcacaatccggcgcctgcgggagcagaccgaagcatgattgcgggcagcttgaaaaggagtacctggatttttgtagttcagccaagagccgtgaaccattttgcctttttagctaaatgaacaagaaatgtttatctatctgtagtgaccactttgtactcatggtttgtcatgctaaattgatggtatgcactatgcaatgcaaaaaaaaaaaaaaaaa

SEQ ID NO: 9382 - protein, 92 aa, Zea mays; identical to SEQ ID NO: 294
  misc_feature: Ceres CLONE ID no. 1514797
  misc_feature: Ceres CDNA ID no. 36706817
  misc_feature: null
  misc_feature: Useful for making plants with modulated cold sensitivity
  misc_feature (2)..(91): Pfam Name: Ribosomal_L37ae PFAM Desc: Ribosomal L37ae protein family
  misc_feature: Homolog of GI Number: 56202147 NR Desc: putative ribosomal protein L37a
  misc_feature: Homolog of GI Number: 34911166 NR Desc: putative 60S ribosomal protein L37a
  misc_feature: Homolog of GI Number: 50932741 NR Desc: putative 60S ribosomal protein L37a
  misc_feature: Homolog of GI Number: 58578274 NR Desc: 60S ribosomal protein L37a
  misc_feature: Homolog of GI Number: 4090257 NR Desc: ribosomal protein L37A
  misc_feature: Homolog of GI Number: 4741896 NR Desc: 60S ribosomal protein L37a
  misc_feature: Homolog of GI Number: 6016699 NR Desc: putative 60S ribosomal protein L37a
  misc_feature: Homolog of GI Number: 395077 NR Desc: ribosomal protein L37a
  misc_feature: Homolog of GI Number: 71042079 NR Desc: Chain D
  misc_feature: Homolog of GI Number: 7576200 NR Desc: protein synthesis initiation factor

SEQ ID NO: 9383 - DNA, 656 bp, Zea mays
  misc_feature: Ceres CLONE ID no. 1514961
  misc_feature: Ceres CDNA ID no. 40041446
  CDS (2)..(655): REFERENCED BY SEQ ID NO: 9384
acaccgaagcttctcactagtaaatggcggctccctcctccaccgccgccaccatcatcagctcctgctgccgcctcgggcctccctctccgcccgaacaagccgctgcaggcgctcgcaggccgcaggcgccggcagcaggcgtgtcggcgtcgcacgcgctgcgcggggcgtgcgtggcagccgcggcgtgcgcggcgatggggatggcgggcggcggcgacatagcgctggcgcgggacggggcattcgtcgccacgtggaccgacgccatgggcgccgcgcgcaccaaggcgccggcgcggtggagcgagcgcaggcagtgcccgccgtggcgcgccaactcgctggagaacgtcgtgcccgagaacctgccccgcccgcccgcgcccaggaggttcgacagcgtctcggtctcggcggccgcgccggacttggtggcgccgccgccctctgtcctcgcggcggtgcgccccggcacgggctgcttctcgctctgacgcgccgcgggcaactgtggagatcggaggttgtaagaaaaaaaaagcgacaaatgtggagatcggaggttttattgtctcagtatctcatgaattcttgccggcaactttgtgttaatagaaaatttgctaattttgtgaaaaaaaaaaaaaaaa

SEQ ID NO: 9384 - protein, 158 aa, Zea mays
  misc_feature: Ceres CLONE ID no. 1514961
  misc_feature: Ceres CDNA ID no. 40041446
MAAPSSTAATIISSCCRLGPPSPPEQAAAGARRPQAPAAGVSASHALRGACVAAAACAAMGMAGGGDIALARDGAFVATWTDAMGAARTKAPARWSERRQCPPWRANSLENVVPENLPRPPAPRRFDSVSVSAAAPDLVAPPPSVLAAVRPGTGCFSL

SEQ ID NO: 9385 - DNA, 866 bp, Zea mays
  misc_feature: Ceres CLONE ID no. 1515722
  misc_feature: Ceres CDNA ID no. 25446179
  CDS (532)..(825): REFERENCED BY SEQ ID NO: 9386
aaaatttcaattactatacttctagaaaataaacaaggtccaacgttgtttgctttccatttcccttctactttgatattatgtgatttggtttattcatattactgtccatagcatatttgttgtggacacagttataaattcattttctagacactgcacaggcaagggggaaatcttcttatagatatgtttcgtcactgtgacaatcatttgggagagaaacaagtaaacaacccttttttccataaaactccatctggaagtgcacgacagccactacagttgactaacgatgtaaccaagatgatgcaaaagcatcagctggaaacgccacagttccatcagacccgattttccgttttactgaatgtaccgaggagcacagagaagtgtgtgacataactaatacatgccttccttattcctctgcttctccctttccctttcttaacagtttattttcacgttgttgctggaatccatctaagagatgtctcctttttaattcctcattcttggctgcctgctatgttggatgatcagatgtcatttccatccctaagacaaacaagaactacaggctgcttccgtcttcacccaatcagggatgaggatgccaagttcaagctctgcaatgggatgtctgttcaatttgacgtcggcaacatggtcatggtgaccggcgggaggaacaccgggcgtgtaggagtgatcaagaactgggagaagcacaagggcatcttcgaggtcatcgacgtgctgcttggagctttttgcatgctatgtctagttttctcatatttgttgtacaggaaaacatagaatggaattcaaatttggtggtcgcaaaaaaaaaaaaaaaa

SEQ ID NO: 9386 - protein, 97 aa, Zea mays
  misc_feature: Ceres CLONE ID no. 1515722
  misc_feature: Ceres CDNA ID no. 25446179
  misc_feature (42)..(75): Pfam Name: KOW PFAM Desc: KOW motif
  misc_feature: Homolog of GI Number: 2331301 NR Desc: ribosomal protein S4 type I
  misc_feature: Homolog of GI Number: 2345154 NR Desc: ribsomal protein S4
  misc_feature: Homolog of GI Number: 44894458 NR Desc: ribosomal protein S4
  misc_feature: Homolog of GI Number: 48596901 NR Desc: ribosomal protein
  misc_feature: Homolog of GI Number: 73759787 NR Desc: ribosomal protein S4
  misc_feature: Homolog of GI Number: 50931205 NR Desc: putative 40S ribosomal protein S4
  misc_feature: Homolog of GI Number: 6598334 NR Desc: putative ribosomal protein S4
  misc_feature: Homolog of GI Number: 10177019 NR Desc: ribosomal protein S4
  misc_feature: Homolog of GI Number: 53791616 NR Desc: putative 40S ribosomal protein S4
  misc_feature: Homolog of GI Number: 50252099 NR Desc: putative ribosomal protein S4
MLDDQMSFPSLRQTRTTGCFRLHPIRDEDAKFKLCNGMSVQFDVGNMVMVTGGRNTGRVGVIKNWEKHKGIFEVIDVLLGAFCMLCLVFSYLLYRKT

SEQ ID NO: 9387 - DNA, 894 bp, Zea mays
  misc_feature: Ceres CLONE ID no. 1515955
  misc_feature: Ceres CDNA ID no. 25446180
  CDS (39)..(728): REFERENCED BY SEQ ID NO: 9388
aaaaaaaaaaagttcatagtttttgctcttcctctctcatggtcacaatgcttgcagctagttctctagtgaacagcaacctcgcttgctcatcaaggatatcatcctgttcagacttcacatatagccactcctggcgtcccatacatgctatgaaactccatcagatgcgtgctgtgagctcaatacgtataagttgtgctgccactaaacctgcaaagactcctgctgaagaagaatggaaagttaagcggcaactgctatcagaaaagcgggtacgaagtgtcgatgtgaaggaagcactgcgccttcaaaaggaaaacaactttgtcattcttgatgtcaggccagaagcagagtttaaagaggctcatccacctggcgccatcaatgtacaaatatacagattaatcaaggaatggacagcgtgggatattgcgaggcgtgcagcgtttgcgttcttcggcatatttgctggaacagaagagaatcctgagttcatacagagtgttgatacgaaggttgggaaagatgcgaagataattgtggcatgctctacaggagggacactgaagccaacgcaaaatttccctgatgggaagcaatctcggtccctgatagctgcgtacttgttggtcctgaatggctacagcaacgtgtaccatctggaaggaggactttacacatggttcaaagaaggactaccagctgttgcaggagaagagtaagagagacattacgaacatagtgttcgcatgctggagagagtggagagtggagactagagttgcgaggacttgtagtgatgtgcttgcttcacagtcacagggttgtcgattgttgtgtacggattgagatgtcgaagatttctcctgccaaaaaaaaaaaaaaaaa

SEQ ID NO: 9388 - protein, 229 aa, Zea mays
  misc_feature: Ceres CLONE ID no. 1515955
  misc_feature: Ceres CDNA ID no. 25446180
  misc_feature (85)..(119): Pfam Name: Rhodanese PFAM Desc: Rhodanese
  misc_feature: Homolog of GI Number: 20334878 NR Desc: AT4g27700/T29A15_190
  misc_feature: Homolog of GI Number: 30250144 NR Desc: putative transmembrane protein
MVTMLAASSLVNSNLACSSRISSCSDFTYSHSWRPIHAMKLHQMRAVSSIRISCAATKPAKTPAEEEWKVKRQLLSEKRVRSVDVKEALRLQKENNFVILDVRPEAEFKEAHPPGAINVQIYRLIKEWTAWDIARRAAFAFFGIFAGTEENPEFIQSVDTKVGKDAKIIVACSTGGTLKPTQNFPDGKQSRSLIAAYLLVLNGYSNVYHLEGGLYTWFKEGLPAVAGEE

SEQ ID NO: 9389 - DNA, 550 bp, Zea mays
  misc_feature: Ceres CLONE ID no. 1515982
  misc_feature: Ceres CDNA ID no. 25445974
  CDS (83)..(364): REFERENCED BY SEQ ID NO: 9390
aatccaccatcacacagcaatccacacaagcacttcgacgtcacacgggcgctgcgcacagacacaccaagcgtcggcaccaatggcttactaccaggaggtggactactgctcggaggaggtgaggtcggtggccccggccggcttcggccgccacggcggcggcgtccagcagcacgtcgtcaaggagaagttcgaggaggtcgacacggtctcacgcgccggcgccaaccaccaccaccaccatggtcaccacggcggccacggcttcgtggtgcgcgagaccagggtcgaagaggacatcaacacctgcaccggcgagttccacgagcgcagggagagcttcctcgccagggctaactgagccgcccggcggccggcatccacgcccgttcgtgcttgcctgcgtgccttatgtatgtctgtggttgactggttgtgcagggtcatcgtacttggctatcgtacgtgcacgcactcagctcctgtacgaattacgacaataagctcgtgacctgaataaaacttcttcgtaaaaaaaaaaaaaaaa

SEQ ID NO: 9390 - protein, 93 aa, Zea mays; identical to SEQ ID NO: 7384
  misc_feature: Ceres CLONE ID no. 1515982
  misc_feature: Ceres CDNA ID no. 25445974
  misc_feature: Homolog of GI Number: 50902350 NR Desc: P0456E05.27
  misc_feature: Homolog of GI Number: 6478144 NR Desc: putative glycine
  misc_feature: Homolog of GI Number: 50902348 NR Desc: P0456E05.26

SEQ ID NO: 9391 - DNA, 578 bp, Zea mays
  misc_feature: Ceres CLONE ID no. 1516003
  misc_feature: Ceres CDNA ID no. 25446181
  CDS (2)..(262): REFERENCED BY SEQ ID NO: 9392
aatcacagcagcaacagccgaaacagcaacagcctacctcttcgtgttaatcgtgtcccttcccttccttggctgcaggatccaagcaacacggaaggagggaggtgagcaccatgtcggcgctgttcaacttcaactccttcctgaccgtggtgttgctggtgatctgcacctgctcctacatcaagatgcagttcccggcaatcctcaacgaccgcaccggattccgtggtttcttttggaaagctgccaggataggtgagcgattgagcccttgggtatcagtcgggtgcttggctatgggaatatccactattttcttctaaggccgaattgttaatctccacaaatttagtctaggacgcagcaccttgtttcacttgtagagaaaaaaaaaactattgtaatcattttgcttcagtttttaatggaatgggcattgtaagatctgtatatgcactgagatttctgagactaacaaaaatgttttctcataagatttctgagaaaaaaactttgtagaccttgtagctgtttgaagagtggtaattgatgaactgctgagaaaaaaaaaaaaa

SEQ ID NO: 9392 - protein, 70 aa, Zea mays
  misc_feature: Ceres CLONE ID no. 1516003
  misc_feature: Ceres CDNA ID no. 25446181
  misc_feature: Homolog of GI Number: 24643250 NR Desc: CG14199
  misc_feature: Homolog of GI Number: 54643799 NR Desc: GA12819
  misc_feature: Homolog of GI Number: 73952320 NR Desc:  similar to CG14199
  misc_feature: Homolog of GI Number: 76669099 NR Desc:  similar to CG14199
  misc_feature: Homolog of GI Number: 62859209 NR Desc: LOC548921
  misc_feature: Homolog of GI Number: 32404220 NR Desc: predicted protein
  misc_feature: Homolog of GI Number: 66849938 NR Desc: DUF1242 domain protein
MSALFNFNSFLTVVLLVICTCSYIKMQFPAILNDRTGFRGFFWKAARIGERLSPWVSVGCLAMGISTIFF

SEQ ID NO: 9393 - DNA, 735 bp, Zea mays
  misc_feature: Ceres CLONE ID no. 1516055
  misc_feature: Ceres CDNA ID no. 25446706
  CDS (53)..(403): REFERENCED BY SEQ ID NO: 9394
aattctcatcacactcgatcgcagtttgcagaaagctagaagacacaagaacatggcgtccaagcgactcctcgtgctagtagctctcctgctcgccgccgttttccttgccgtctcagcagcagctaacgacgaccaagcccaaccaaggaaggacgacggcggcgagaacaaagccgacgtgcaggactaccgtggcggcggcggcggctggcgcggtgggggtggctaccccggccgtggctacccgggcgggggcggctaccctggcggcggccgcggcggttactgcaggtgggggtgctgcaaccgcgggtactatggcggctgccggtgctgctcgcgcgccgacgaggtcccggagcccatgtaccgcccggagcccaccgaggtccacaactgaagccaagccacacatcgatctacaaagatgcatggacgacgactcttatcgtagctaattaataagcactgcatccatgtccacaatagctagggccctagccctactatacgtcgtcagcagaaagtctggttttgatttcaataataagatgcacctatatgtgtgtgttatatgtacgccgttgtcttaattactgtgtggtgattggactcactagtagctattgtcgtcgtgttgtcgtctctcggtgagtcgtacttgctcttggaccaaatgctgcgtttaatctgtaaaactaccaaattatactaaaaaaaaaaaaaaaaaaa

SEQ ID NO: 9394 - protein, 116 aa, Zea mays
  misc_feature: Ceres CLONE ID no. 1516055
  misc_feature: Ceres CDNA ID no. 25446706
  misc_feature (1)..(93): Pfam Name: GRP PFAM Desc: Glycine rich protein family
  misc_feature: Homolog of GI Number: 50909901 NR Desc: putative glycine
  misc_feature: Homolog of GI Number: 27461096 NR Desc: glycine
  misc_feature: Homolog of GI Number: 728596 NR Desc: glycine rich protein
  misc_feature: Homolog of GI Number: 7024449 NR Desc: glycine
  misc_feature: Homolog of GI Number: 4581171 NR Desc: putative glycine
  misc_feature: Homolog of GI Number: 4206767 NR Desc: glycine
  misc_feature: Homolog of GI Number: 295808 NR Desc: glycine
  misc_feature: Homolog of GI Number: 7442088 NR Desc: glycine
  misc_feature: Homolog of GI Number: 13443598 NR Desc: glycine
  misc_feature: Homolog of GI Number: 1346181 NR Desc: Glycine
MASKRLLVLVALLLAAVFLAVSAAANDDQAQPRKDDGGENKADVQDYRGGGGGWRGGGGYPGRGYPGGGGYPGGGRGGYCRWGCCNRGYYGGCRCCSRADEVPEPMYRPEPTEVHN

SEQ ID NO: 9395 - DNA, 662 bp, Zea mays
  misc_feature: Ceres CLONE ID no. 1516826
  misc_feature: Ceres CDNA ID no. 36699055
  CDS (64)..(474): REFERENCED BY SEQ ID NO: 9396
aacaccgcaatcttcaatctccccagcaatccctagcagaagccttccatcctcactcgctcgatggcccgcacgaagcagacggcgaggaagtccaccggcggcaaggcgccgaggaagcagctggcgactaaggcggcccgcaagtctgcccctgcgaccggcggagtgaagaagccccaccgcttccgccccggcaccgtcgcgctccgggagatccgcaagtaccagaagagcacggagctgctgatccgcaagctgccgttccagcgcctggtgcgggagatcgcgcaggacttcaagaccgacctacgcttccagagctctgctgtctccgcgctgcaggaggcggctgaggcctaccttgtcgggctcttcgaggacaccaacctctgcgccatccacgccaagcgcgtcaccatcatgcccaaggacatccagcttgcccgccgcatccgcggggagagggcctaagcgtcatattttctgtcatcagtgcccgatcagaagatgtagagatatgctgggttctgtagtttgggttactgtcgaatcatcgagtgttggctgttcactgctgtaacttaattatcatgatgcatatgaaatggcaatgaactctgttatcagttctaaaaaaaaaaaaaaaaaaaaaaaaaaaa

SEQ ID NO: 9396 - protein, 136 aa, Zea mays; identical to SEQ ID NO: 588
  misc_feature: Ceres CLONE ID no. 1516826
  misc_feature: Ceres CDNA ID no. 36699055
  misc_feature (58)..(134): Pfam Name: Histone PFAM Desc: Core histone H2A/H2B/H3/H4
  misc_feature: Homolog of GI Number: 59799581 NR Desc: Histone H3
  misc_feature: Homolog of GI Number: 166384 NR Desc: histone H3
  misc_feature: Homolog of GI Number: 1362108 NR Desc: histone H3 homolog
  misc_feature: Homolog of GI Number: 55775689 NR Desc: histone 3
  misc_feature: Homolog of GI Number: 122083 NR Desc: Histone H3
  misc_feature: Homolog of GI Number: 50960584 NR Desc: HIST2H3C protein
  misc_feature: Homolog of GI Number: 61842355 NR Desc:  similar to HIST1H3I protein
  misc_feature: Homolog of GI Number: 122070 NR Desc: Histone H3
  misc_feature: Homolog of GI Number: 68362812 NR Desc:  similar to CG31613
  misc_feature: Homolog of GI Number: 50728592 NR Desc:  similar to histone protein Hist2h3c1

SEQ ID NO: 9397 - DNA, 837 bp, Zea mays
  misc_feature: Ceres CLONE ID no. 1516834
  misc_feature: Ceres CDNA ID no. 25446778
  CDS (175)..(582): REFERENCED BY SEQ ID NO: 9398
aaagcacgcgcgcgccctgtgctccccctcagtcctcgctggtcctttctccatcacaaacgctagtcttttcctaaagagaaaactccttccgtgtgtaaccagatccgctagcatcggtggaacctcggcctcgtttagttcgtaaagctcggagaccgccggaagcgagcgatggcgtgcaagacgaagagcctgctgttggcgctcagcgtggcggcgctgctcgcggcgcggtcggagtcccacggcctgggggacttcacgagcgggagcgacgaggcgacgacgacgccggagatgcagaccttcttcaagccccaggccgccgcggcgctcccggaggccctcgacgcctccatgcccgccaagccggaggccacggcgctcccggccaccaccaccgccgccgccgcgacaacggccggcacggcgccgtcagccacgccgcgcaggtccgtgtccgtggccgccggcgtggcctgcggcgtggcggccgtggccgtggccggcatcgcggccgccgtggcgtacgtggtggtgcgcggcgcgcggcgcgggacggaggtgcagctcggttagctcctcccccgtgagccccgtccggccgggcccgcgtcataggccgtcgtcgtcggcgttaggatctgggttaagcgcgttgtttagctttgcgattttgtgttttagtcgatctgcagactgggcttgcttttgggtcggcggttgtattctttcgtacgtgtcgtgtcgctaccgagtacgtacggaccagcacagtggtgcatgtgtgacataaataaatgctggttgtagcgtcaaaaaaaaaaaaaaaaa

SEQ ID NO: 9398 - protein, 135 aa, Zea mays
  misc_feature: Ceres CLONE ID no. 1516834
  misc_feature: Ceres CDNA ID no. 25446778
  misc_feature: Homolog of GI Number: 50928779 NR Desc: OSJNBa0058K23.15
  misc_feature: Homolog of GI Number: 66780099 NR Desc: PE
  misc_feature: Homolog of GI Number: 73950203 NR Desc:  similar to serine/arginine repetitive matrix 1 isoform 1
  misc_feature: Homolog of GI Number: 66778899 NR Desc: UvrD/REP helicase
  misc_feature: Homolog of GI Number: 61826057 NR Desc:  similar to serine\/arginine repetitive matrix 1
  misc_feature: Homolog of GI Number: 57043292 NR Desc:  similar to serine/arginine repetitive matrix 1
  misc_feature: Homolog of GI Number: 73950193 NR Desc:  similar to serine/arginine repetitive matrix 1 isoform 2
  misc_feature: Homolog of GI Number: 66776813 NR Desc: Phosphoribosylaminoimidazole
  misc_feature: Homolog of GI Number: 55665385 NR Desc: serine\/arginine repetitive matrix 1
  misc_feature: Homolog of GI Number: 33150824 NR Desc: Ser/Arg
MACKTKSLLLALSVAALLAARSESHGLGDFTSGSDEATTTPEMQTFFKPQAAAALPEALDASMPAKPEATALPATTTAAAATTAGTAPSATPRRSVSVAAGVACGVAAVAVAGIAAAVAYVVVRGARRGTEVQLG

SEQ ID NO: 9399 - DNA, 862 bp, Zea mays
  misc_feature: Ceres CLONE ID no. 1516874
  misc_feature: Ceres CDNA ID no. 25447074
  CDS (240)..(701): REFERENCED BY SEQ ID NO: 9400
actttaacgttattttacttattccgtgggtcggaagcggggcaccgcccctccttttggctccaaggcccggcctcgccgggccgatccgggcggaagacattgtcaggtggggagtttggctggggcggcacatctgtaaaccctacccgactccgccgccgctcccgctccgccccagcgcatcgcccgccgccacagcgtaccgcgacctcatctatcaccttcagctttcaatcatggcggacgtcgatgtcgaaccggaggttgccgccggagctcccaagaagaggacgttccgcaagtacagctaccgcggcgtcgacctagatgcgcttctcgacatgtccactgacgacctcgtccagctcttccccgcgcgcgccaggagaaggttccagaggggtctgaagaggaagcccatggcgctcatcaagaaactgcgcaaggcgaaaaaggatgctcctgctggtgagaagcctgagccagtcaagacacatctccgtaacatgatcattgtccctgagatgattggaagcattgttggtgtctacaacggcaagaccttcaaccaggttgagatcaagcctgagatgatcggccactaccttgctgagttctccatctcctacaagccggtcaagcacggcaggcccggtatcggtgccacccactcctcgcggtttattcctctgaaatgagctggtactcggctctttagtatcccaagacattttgtgttgttccattccagctcaagaattcaaagctaagcattgcacaattatgctgttttgttggaagtatttgagttaatcatatctaagctgagttgctacgttcttgcaaaaaaaaaaaaaaa

SEQ ID NO: 9400 - protein, 153 aa, Zea mays; identical to SEQ ID NO: 6834
  misc_feature: Ceres CLONE ID no. 1516874
  misc_feature: Ceres CDNA ID no. 25447074
  misc_feature (55)..(136): Pfam Name: Ribosomal_S19 PFAM Desc: Ribosomal protein S19
  misc_feature: Homolog of GI Number: 50919151 NR Desc: putative 40S ribosomal protein S15
  misc_feature: Homolog of GI Number: 50934735 NR Desc: putative 40S ribosomal protein S15
  misc_feature: Homolog of GI Number: 15425963 NR Desc: 40S ribosomal protein S15
  misc_feature: Homolog of GI Number: 20465567 NR Desc: putative ribosomal protein S15
  misc_feature: Homolog of GI Number: 20147171 NR Desc: At1g04270/F19P19_29
  misc_feature: Homolog of GI Number: 1107485 NR Desc: 40S ribosomal protein S15
  misc_feature: Homolog of GI Number: 82621162 NR Desc: 40S ribosomal protein S15
  misc_feature: Homolog of GI Number: 2982268 NR Desc: probable 40S ribosomal protein S15
  misc_feature: Homolog of GI Number: 81076490 NR Desc: 40S ribosomal protein S15
  misc_feature: Homolog of GI Number: 79316582 NR Desc: RPS15

SEQ ID NO: 9401 - DNA, 797 bp, Zea mays
  misc_feature: Ceres CLONE ID no. 1517021
  misc_feature: Ceres CDNA ID no. 25446182
  CDS (168)..(581): REFERENCED BY SEQ ID NO: 9402
aagaaaaaaaaaaaaaaaaaaaaatcgactggcgacgactccgccaccgccgccgctctgcgcgagacgcccaggtcttcgccaacgacgagcatccgtttatatacaattgcaaaccccagattacgagctacagggttagagaggaagaaattgcaaccgaaacaatggcggcagattccggcgctcgcagacaaccaagcttcaccaaggtcgaccagctgcgccctggaacccacggccacaacctcatcctcaaggttgttgactccaagattgtcgtccagagaggccgcgagggagggccccagggaagacagatgaggattgcggagtgcttggttggtgatgaaaccggcatcattgtcttcactgcaagaaacgatcaagtggatgtaattaggcctggaacaactgttgaactgaggaacgcaaagatcgacatgttcaagggttcgatgcggcttgcagtggacaagtggggaattgtcaaagctgctgaaagctcagctgagtggacagtcaaggaggacaacaacctgtccttaattgagtttgagctggtgaccgtgacggagtgaaaaccgccattgcttaggagtattgttggttttctgtgttgttgaacctaatcatcatcgccaatcaataaggactcgtggttgatgttctcggcatcggagttgcgtattgctgtaccgttgcttgcttactgtgcgttgtggctacttttgactgctatcgaataataataaattggtgtcatgaaaaaaaaaaaagaaaaaaaaaaaaaaaaa

SEQ ID NO: 9402 - protein, 137 aa, Zea mays
  misc_feature: Ceres CLONE ID no. 1517021
  misc_feature: Ceres CDNA ID no. 25446182
  misc_feature: Homolog of GI Number: 5091555 NR Desc: T10O24.24
  misc_feature: Homolog of GI Number: 6573753 NR Desc: F20B24.1
  misc_feature: Homolog of GI Number: 57900332 NR Desc: DNA
  misc_feature: Homolog of GI Number: 34909622 NR Desc: P0435B05.31
  misc_feature: Homolog of GI Number: 34904470 NR Desc: OSJNBa0086P08.14
  misc_feature: Homolog of GI Number: 25329540 NR Desc: probable tyrosyl
MAADSGARRQPSFTKVDQLRPGTHGHNLILKVVDSKIVVQRGREGGPQGRQMRIAECLVGDETGIIVFTARNDQVDVIRPGTTVELRNAKIDMFKGSMRLAVDKWGIVKAAESSAEWTVKEDNNLSLIEFELVTVTE

SEQ ID NO: 9403 - DNA, 569 bp, Zea mays
  misc_feature: Ceres CLONE ID no. 1517677
  misc_feature: Ceres CDNA ID no. 35383445
  CDS (23)..(277): REFERENCED BY SEQ ID NO: 9404
aagagattcgcatattctcgcgatgggagcggaggaagcagagggtactcccccgccgctgcccgccaccggcgagcccgcaaccacggcaagggcgcagccaatatctgcagcacaattcctctcctggaagcagcgcaaggatgcagaggtagccgcaaggaaagctgaagcagctgagaagcgagctgatgatatcgcttcgggagcggcgcagatgaacggccgcgagctgttccaacatgagccctgggtgttcgacaacaacatttactgagatcgtgtcgggctactgttcctgcattagtccaagctccagcggtggtttcattttgtactgctatatcagctttgcgaaactgtggattttatttcaccgtttctaagattattctctcaataggtaattgaacttgtttcaaatacgttttgccaaatctttgtgcagtcaccgaatggtatctagtgtcgctattctttttctaaaactcttacaaacaaagagtattggtcggaagagaattctcgatcttcagattatcgttgttttcgaaaaaaaaaaaaaaaaa

SEQ ID NO: 9404 - protein, 84 aa, Zea mays
  misc_feature: Ceres CLONE ID no. 1517677
  misc_feature: Ceres CDNA ID no. 35383445
  misc_feature: Homolog of GI Number: 9280685 NR Desc: F2E2.21
MGAEEAEGTPPPLPATGEPATTARAQPISAAQFLSWKQRKDAEVAARKAEAAEKRADDIASGAAQMNGRELFQHEPWVFDNNIY

SEQ ID NO: 9405 - DNA, 699 bp, Zea mays
  misc_feature: Ceres CLONE ID no. 1518141
  misc_feature: Ceres CDNA ID no. 25445975
  CDS (78)..(467): REFERENCED BY SEQ ID NO: 9406
agccccatcccccaccacccagtcagtgtctgtcaccgcctcaccgaccacacgccaagggaagaagcagcagcgccatggccgcgccgctcacggccgtccgggcccggatcgaggagctcaccgacgagcggaaggcgctgctcaaggggtcgttccgggaccgccacttcaacgcgggctccctcctcctcggcctcggcgtgctcgagtccgtcggcggcgcgctcaacacctggttccgcaccggcaagctgttcccgggcccgcacctcttcgcgggcgccgccatcaccgtgctgtgggccgccgcggccgcgctcgtcccggcgatgcagaagggggacgagacggcccgcagcctgcacatcgcgctcaacgccgtcaacgtcctgctcttcgtctggcagatccccaccgggctcgagatcgtcggcaaggtcttcgagttcaccacctggccatgagacgacgtccttgtgcgtgcgtgtctgctctgctatgcgcatcctgcatgtcccttcacccttctcttctctttcgtcccatcccatgacccatgtattgcttggtagtgttaggttcaatctccgtctgcaggtcgttgttttcttgacctgtcgaagtcgatccatgttcacaaagctgtgatgctgagaatgccaatcacaagttcctttacactgtaaaaaaaaaaaa

SEQ ID NO: 9406 - protein, 129 aa, Zea mays
  misc_feature: Ceres CLONE ID no. 1518141
  misc_feature: Ceres CDNA ID no. 25445975
  misc_feature: Homolog of GI Number: 23130190 NR Desc: COG1114: Branched
  misc_feature: Homolog of GI Number: 34809533 NR Desc: Epa5p
  misc_feature: Homolog of GI Number: 34809534 NR Desc: Epa4p
  misc_feature: Homolog of GI Number: 5420387 NR Desc: proteophosphoglycan
  misc_feature: Homolog of GI Number: 11359723 NR Desc: proteophosphoglycan
  misc_feature: Homolog of GI Number: 13592175 NR Desc: ppg3
  misc_feature: Homolog of GI Number: 50933659 NR Desc: putative high
  misc_feature: Homolog of GI Number: 54639174 NR Desc: GA15378
  misc_feature: Homolog of GI Number: 55770203 NR Desc: putative proteophosphoglycan
  misc_feature: Homolog of GI Number: 23274133 NR Desc: Serine/arginine repetitive matrix 1
MAAPLTAVRARIEELTDERKALLKGSFRDRHFNAGSLLLGLGVLESVGGALNTWFRTGKLFPGPHLFAGAAITVLWAAAAALVPAMQKGDETARSLHIALNAVNVLLFVWQIPTGLEIVGKVFEFTTWP

SEQ ID NO: 9407 - DNA, 614 bp, Zea mays
  misc_feature: Ceres CLONE ID no. 1518238
  misc_feature: Ceres CDNA ID no. 40352018
  CDS (438)..(575): REFERENCED BY SEQ ID NO: 9408
atgatataggaggaaaaatttaggggtaacggttgcagatagccttataaggggtgaaactggagtgcgccgccgtctctcaagtctgaaccagtttgccgagagttcatacgtgccaaattttcattaatcaacggttatggttctgttagtaatgatacaaagtcaatgccatcaacatgtgtagtctaaccttgctccttatttttgccaggatggccgcattgactatggagaatttgttgccatgatgaccaagggcaatatgggagtcggtcgaagaacaatgagaaacagcttgaatatcagcatgagggacgcacctggtgcgttctgagacttaacacgatgtacagcttgtggcttggctacttcctgccttgctgccctacgaaaccttctgcattttttcaagatgttgtcaagtgtctgtgtggatgtgtttttctggggattctgattcaactctggtgattgattccatgaaatgcataacaagatgcccatgtcacgcaagaagccagattgtaaatgctgctgcccctttgactctcagaaacactaatgctcagtgaaaagaaatcgctccctatgcaaaaaaaaaaaaaaaaaaa

SEQ ID NO: 9408 - protein, 29 aa, Zea mays
  misc_feature: Ceres CLONE ID no. 1518238
  misc_feature: Ceres CDNA ID no. 40352018
MMTKGNMGVGRRTMRNSLNISMRDAPGAF

SEQ ID NO: 9409 - DNA, 757 bp, Zea mays
  misc_feature: Ceres CLONE ID no. 1518662
  misc_feature: Ceres CDNA ID no. 40352019
  CDS (215)..(445): REFERENCED BY SEQ ID NO: 9410
agcaccgccaccatctaggctagtctacagctagtacacaccccacaacaatataatcgtcgtcgtggcggattggagttgacagttgccataccaccagtactagctcgctcgctcgcttgctctcagaactgatcgctgtgaaagcaaataagacgacttgtttcattgattcttgaagagatcgagcttcttttgcaccacaaggtcgaggatgtcttgcaactgcggatcaagctgcggctgcggctcaagctgcaagtgcggcaagaagtaccctgacctggaggagacgagcaccgccgcgcaggccaccgtcgtcctcggcgtggccccggagaagaaggccgcgcccgagttcgtcgaggccgcggcggagtccggcgaggccgcccacgcctgcggctgcggtagcagctgcaagtgcgacccctgcaactgctgatcacatcgatcgacgaccatggatatgattattatctatctagcttgtggtggtggttgaacaataataagcgaggccgagctggctgccatacataggtattgtgtggtgtgtgagagagagagaaacagagttcttcagtttgctatctctctctctgcatgtttggcgtcagtctttgtgctcatgtacgtgtgtctacatgcatgttggttgatccgattgcgtctgctgtaaccatatattaattggtccacgatgatatgatttgatactatatatatatatatatactaaaaaaaaaaaaaaaaa

SEQ ID NO: 9410 - protein, 76 aa, Zea mays
  misc_feature: Ceres CLONE ID no. 1518662
  misc_feature: Ceres CDNA ID no. 40352019
  misc_feature (1)..(76): Pfam Name: Metallothio_2 PFAM Desc: Metallothionein
MSCNCGSSCGCGSSCKCGKKYPDLEETSTAAQATVVLGVAPEKKAAPEFVEAAAESGEAAHACGCGSSCKCDPCNC

SEQ ID NO: 9411 - DNA, 717 bp, Zea mays
  misc_feature: Ceres CLONE ID no. 1518663
  misc_feature: Ceres CDNA ID no. 25446008
  CDS (83)..(493): REFERENCED BY SEQ ID NO: 9412
aatcacgcagctttagtcccatctctcaaaccatccgaccccacctcgccgctcactcccaagccagtccctgccggcagcgatggcccgcacgaagcagacggcgcgcaagtcgacgggcggcaaggcgccgcggaagcagctggcgacgaaggcggcgcgcaagtcggcgccggccacggggggcgtgaagaagccgcaccgcttccgcccgggcaccgtggcgctgcgggagatccgcaagtaccagaagagcacggagctgctgatccggaagctgccgttccagcggctggtgcgggagatcgcgcaggacttcaagacggacctccggttccagtcctccgccgtggccgcgctgcaggaggccgccgaggcctacctcgtgggcctcttcgaggacaccaacctctgcgccatccacgccaagcgcgtcaccatcatgcccaaggacatccagctcgcccgccgcatccggggcgagagggcctgagcaccccccgtctctgctgtgttcccttcgctttctgatttctgtagcgcgaagaactactgtagtaggggaagaactacctcgtgttatattggggttgtgggtaggaaactaggaatgttctgttggtttcgatgcagtgcccccgtgatactgacatccgtgctgcttgttctgttcttcctactacaaatgcgattgttactataaaaaaaaaaaaaaaa

SEQ ID NO: 9412 - protein, 136 aa, Zea mays; identical to SEQ ID NO: 358
  misc_feature: Ceres CLONE ID no. 1518663
  misc_feature: Ceres CDNA ID no. 25446008
  misc_feature (58)..(134): Pfam Name: Histone PFAM Desc: Core histone H2A/H2B/H3/H4
  misc_feature: Homolog of GI Number: 34898300 NR Desc: histone H3
  misc_feature: Homolog of GI Number: 57098927 NR Desc:  similar to histone protein Hist2h3c1
  misc_feature: Homolog of GI Number: 34858254 NR Desc: similar to histone protein Hist2h3c1
  misc_feature: Homolog of GI Number: 1362108 NR Desc: histone H3 homolog
  misc_feature: Homolog of GI Number: 55775689 NR Desc: histone 3
  misc_feature: Homolog of GI Number: 74004258 NR Desc:  similar to histone 1
  misc_feature: Homolog of GI Number: 166384 NR Desc: histone H3
  misc_feature: Homolog of GI Number: 34876364 NR Desc: similar to CG31613
  misc_feature: Homolog of GI Number: 34858260 NR Desc: similar to histone protein Hist2h3c1
  misc_feature: Homolog of GI Number: 34876394 NR Desc: similar to histone protein Hist2h3c1

SEQ ID NO: 9413 - DNA, 712 bp, Zea mays
  misc_feature: Ceres CLONE ID no. 1518956
  misc_feature: Ceres CDNA ID no. 25447523
  CDS (341)..(589): REFERENCED BY SEQ ID NO: 9414
aggcgcgatgatggagctcggcgagggcctctgcaagctccgtaagctgcagctagacggcgacggcgacaacgacgggggcggccctttctcccggttccgggacgagatcgccgctgtgctgcagttcctctaccgcacccagaaggagctcgccgcatgtacgtacatccatcgactaccgtcacttcgttccttccttcttcctcgtcgtcgacgtgtgacgtgctaaactaaagctcaccccggtctcggtctgcacatgtaaaaataaatctctgttctttcttttcttctaaattccattcgttcatcaggcaccgatgagctgtgcttaaccatggacggctcgccgagctcgtaccagctgctcggcaacttcgccgccggccagcaactgtaccggctggaactgctggaagcggaggaggacggggcttgttccagcatactgttctctgcgcccaacggcggcggcggcatcgctgcgcaaggagcagctcctcgcccccagagagtgaagcttccaacgctgcgtgccacggagcaacatctggtagcgcttcagtgtacatacgaatatacgtagctataccctagcattcattcatgcgggtccacctgcctgcaaacggcgaagtcataaggataacgcttaataattttactaaaaaaaaaaaaaaaaaaaaaaaaaaaaaaaaaaaaaaaaaaa

SEQ ID NO: 9414 - protein, 82 aa, Zea mays
  misc_feature: Ceres CLONE ID no. 1518956
  misc_feature: Ceres CDNA ID no. 25447523
MDGSPSSYQLLGNFAAGQQLYRLELLEAEEDGACSSILFSAPNGGGGIAAQGAAPRPQRVKLPTLRATEQHLVALQCTYEYT

SEQ ID NO: 9415 - DNA, 640 bp, Zea mays
  misc_feature: Ceres CLONE ID no. 1518972
  misc_feature: Ceres CDNA ID no. 25446185
  CDS (148)..(387): REFERENCED BY SEQ ID NO: 9416
aaccgccaccatctaggctagtctacagctagtacacaccccacaacaatataatcgtcgtcgtggcggattggagttgacagttgccataccaccagtactagctcgctcgctcgcttgctctcagaactgatcgctgtgaggagtatgccgtcgctgtggccaacgaggaagaagcgggcgcgaggctcggcggtccggtcgtggtcgcgccgccgcgggagcaagaaatcatcgtcgtcgtcgtcgctgggggcgctgtggcggcggatggtcgggccacgcagggggacccggacccggactcggacccgggcccgggggaagaagccggggctgctctcgcgcgccgcgcgggtgctctcctgcggccgccgctcctactgatcgatgccatccggcgcggaccggccggcgggcatcgaatcgtccgaatcgagatctgccgtgacgtgcgcgcgtgacttgtctctattcccttcgtgcgcgggttgttgccatgcccgcgagcgctgctgtttcccgtgtcgtgttcgtacctgcgtgggagctatagatgcactcgtgttgtgtgtataaatcattctgtatataaacttcacttgtaatgttgatgttgttgccaaaaaaaaaaaaaaaa

SEQ ID NO: 9416 - protein, 79 aa, Zea mays
  misc_feature: Ceres CLONE ID no. 1518972
  misc_feature: Ceres CDNA ID no. 25446185
  misc_feature: Homolog of GI Number: 66776365 NR Desc: PE
MPSLWPTRKKRARGSAVRSWSRRRGSKKSSSSSSLGALWRRMVGPRRGTRTRTRTRARGKKPGLLSRAARVLSCGRRSY

SEQ ID NO: 9417 - DNA, 895 bp, Zea mays
  misc_feature: Ceres CLONE ID no. 1519368
  misc_feature: Ceres CDNA ID no. 25446186
  CDS (297)..(737): REFERENCED BY SEQ ID NO: 9418
agccccaagggtacacggtcgccgccacctgccctaggccgcaggagggagcgttcgccgccccgccctccgtctcccgtcgcctcgcccccgcgctctgtctgccgcccctctccggaccgtaggaggaggcacaaggccgtctgcttttgtcggcatggaccgctcccttccactgtctcgattgaagcttgatgcgtgactagtagctcctagtctgattttgcgttttgtttgcctgattttggtttacggactagtcagctgcgggtttatctactttttatctaggagaaatgtctgagcatctctttgaggacaccttcgtcgtcactagactcgaccctgatggcaaaaagtttgatagagtttctcgtgttgaagctcgcagcgagcagttagatatgtatatgcagctagatgttgccacagatgtttatcctatgcatgctggcgagaaatttaacatggttatagcgcctactctgaatttggatggcacccctgacactggctactatactcaggctggcagaaaaactctggcagacaattatgagtacgtcatgcaagggaaactttacaaaatctcagaagacacatcatccagccaaaacgctaaagtggagatgtatgcatcgttcggcgggcttcttatgctgctcaggggtgacccttccactgccgctagctttgagcttgatcagaggctctttctgctcatccgcaaggtgtaaaactgtggttgctgaccacttaggtgtttgccttgctcgccacttatttaatttccatccgtgggtgaagctgttatatactgttgtaagtactgttttctgtatcgccatggatttatggtaacgagttcatgtttcttgcgaaaaaaaaaaaaaaa

SEQ ID NO: 9418 - protein, 146 aa, Zea mays; identical to SEQ ID NO: 878
  misc_feature: Ceres CLONE ID no. 1519368
  misc_feature: Ceres CDNA ID no. 25446186
  misc_feature (7)..(145): Pfam Name: RNA_pol_Rpb8 PFAM Desc: RNA polymerase Rpb8
  misc_feature: Homolog of GI Number: 53793231 NR Desc: putative RNA polymerase I
  misc_feature: Homolog of GI Number: 50920087 NR Desc: putative  RNA polymerase
  misc_feature: Homolog of GI Number: 4585968 NR Desc: RNA polymerase I
  misc_feature: Homolog of GI Number: 13094965 NR Desc: RNA polymerase I
  misc_feature: Homolog of GI Number: 60470212 NR Desc: RNA polymerase II core subunit
  misc_feature: Homolog of GI Number: 21358365 NR Desc: CG11246
  misc_feature: Homolog of GI Number: 82942471 NR Desc:  similar to polymerase
  misc_feature: Homolog of GI Number: 14193247 NR Desc: RNA polymerase subunit
  misc_feature: Homolog of GI Number: 27665258 NR Desc: similar to polymerase

SEQ ID NO: 9419 - DNA, 858 bp, Zea mays
  misc_feature: Ceres CLONE ID no. 1519386
  misc_feature: Ceres CDNA ID no. 36706980
  CDS (85)..(651): REFERENCED BY SEQ ID NO: 9420
agtctctccctggtccccgcgtcgcctgcttctgcttcttgcacccccaccccaccacaaccgaaaccccactaataatccgccatggcgctcgcctccggcacgtgccgccccctcctgggtggccccgccagcaccgcgcggctccacctcgctgtctcctcgtcctccaccgcctgctcgatccgcttcccccgcggcgccggcggtggcagggcggccgtctccctccgcgcccccgcgcctccagcggcggcggcggcaacatctggtagcattgctccagcgatttcattgaccgaaaaggccttgaaacatctgaacaaaatgagggctgaacggaacgaagatttgtgcttgagaattggagtgaaacagggtggatgctcaggcatgtcttacaccatggagtttgaaaatcgagcagatgccagccctgatgattctgttgtagagtatgatggttttgccatagtctgtgaccccaaaagccttctcttcatgtttggaatggagctggactacagcaacgcactcattggtggaggcttctcttttcagaatccaaacgcaacaaaaacctgtgggtgcggcaaatctttcgcgactgggaaggaatccgaggctgcagcaaaagcttgcaacaactagagtagtgaaatattgatagcaaatcgtgatgtaacttgttatatagcttgctcctgatcaaatcacgtggctccaccacttatacttgtttcgtttcaaaatagttggctttgtttgttttttcaggataactttgatcagatatatacaagaaaacattaatacttatggtatataattaatattaattgataaaaaaaaaaaaaa

SEQ ID NO: 9420 - protein, 188 aa, Zea mays
  misc_feature: Ceres CLONE ID no. 1519386
  misc_feature: Ceres CDNA ID no. 36706980
  misc_feature (68)..(174): Pfam Name: HesB PFAM Desc: HesB
  misc_feature: Homolog of GI Number: 55297134 NR Desc: hesB
  misc_feature: Homolog of GI Number: 38603854 NR Desc: At1g10500
  misc_feature: Homolog of GI Number: 67921859 NR Desc: HesB/YadR/YfhF
  misc_feature: Homolog of GI Number: 45509112 NR Desc: COG0316: Uncharacterized conserved protein
  misc_feature: Homolog of GI Number: 71673782 NR Desc: HesB/YadR/YfhF
  misc_feature: Homolog of GI Number: 78213865 NR Desc: HesB/YadR/YfhF
  misc_feature: Homolog of GI Number: 78183915 NR Desc: HesB/YadR/YfhF
  misc_feature: Homolog of GI Number: 78712004 NR Desc: HesB/YadR/YfhF
  misc_feature: Homolog of GI Number: 77165127 NR Desc: HesB/YadR/YfhF
MALASGTCRPLLGGPASTARLHLAVSSSSTACSIRFPRGAGGGRAAVSLRAPAPPAAAAATSGSIAPAISLTEKALKHLNKMRAERNEDLCLRIGVKQGGCSGMSYTMEFENRADASPDDSVVEYDGFAIVCDPKSLLFMFGMELDYSNALIGGGFSFQNPNATKTCGCGKSFATGKESEAAAKACNN

SEQ ID NO: 9421 - DNA, 510 bp, Zea mays
  misc_feature: Ceres CLONE ID no. 1519879
  misc_feature: Ceres CDNA ID no. 25446733
  CDS (1)..(237): REFERENCED BY SEQ ID NO: 9422
attcacgcacctagggttttcgcgccgccgccgcagccgcaacaatgccgtcgcacaagaccttccggatcaagaagaagctggcgaagaagatgcgccagaaccgccccatcccctactggatccgcatgcgcactgacaataccatcaggtacaacgccaagcgcaggcactggcgccgcaccaagctcggcttctgagcgtcgggattggccggctgctgcgtcggaaggctagggtctaagagctatcttctgttttatcattgtctctgtttctgtaagctagcaagtgatgctgtgatgcttttattaagattctgatgagtggtgacgttaagagaaaattggcagtactgtgttgtaccccaagattccttgcagcattgctatgctaagtaacgaaccctttatcttattatatatgtagtgttgcagtgattgaggtccaaaaaaaaaaaaaaaaaaaaaaaaaaaaaaaaaaaaaaaaaaaagaaaaaaaaaaaaaaaa

SEQ ID NO: 9422 - protein, 51 aa, Zea mays; identical to SEQ ID NO: 2406
  misc_feature: Ceres CLONE ID no. 1519879
  misc_feature: Ceres CDNA ID no. 25446733
  misc_feature (9)..(51): Pfam Name: Ribosomal_L39 PFAM Desc: Ribosomal L39 protein
  misc_feature: Homolog of GI Number: 50915614 NR Desc: putative 60S ribosomal protein L39
  misc_feature: Homolog of GI Number: 50915618 NR Desc: 60S RIBOSOMAL PROTEIN L39
  misc_feature: Homolog of GI Number: 55773789 NR Desc: 60S ribosomal protein L39
  misc_feature: Homolog of GI Number: 57471714 NR Desc: ribosomal protein L39
  misc_feature: Homolog of GI Number: 21618028 NR Desc: putative ribosomal protein L39
  misc_feature: Homolog of GI Number: 24266968 NR Desc: ribosomal protein L39
  misc_feature: Homolog of GI Number: 66934980 NR Desc: ribosomal protein L39
  misc_feature: Homolog of GI Number: 67084113 NR Desc: ribosomal protein L39
  misc_feature: Homolog of GI Number: 58394407 NR Desc: ENSANGP00000020220
  misc_feature: Homolog of GI Number: 54609275 NR Desc: ribosomal protein L39

SEQ ID NO: 9423 - DNA, 1055 bp, Glycine max
  misc_feature: Ceres CLONE ID no. 1520023
  misc_feature: Ceres CDNA ID no. 40352020
  CDS (1)..(852): REFERENCED BY SEQ ID NO: 9424
ctagcccagctgcccacccattcccctcaccgccgccgccgccactgcgccgctgccgccgccgagatgggtcgcgtgatccgcgctcagcgtaagggtgcgggctccgtcttcaagtcccacacccaccaccgcaagggccccgcccggttcaggtcgctcgacttcggcgagcgcaacgggtacctcaagggcgtcgtcaccgatgtcatccacgacccggggcgtggtgcgccgctggccaaggtgaccttccgccacccgttcaggtacaagcaccagaaggagctcttcgtcgccgccgagggtatgtacaccggccagttcgtctactgcggacgccgcgccaccctctccgtcggcaacgtcctcccgctccgctccgttcctgagggaggcgtcatctgcaacgtcgagcaccacgtcggcgaccgcggtgtcttcgccagggcatccggtgactacgccatcgtcatcagccacaaccccgacaacggcacctcaaggatcaagctcccctctggtgccaagaagattgtcccaagcagctgccgtgccatgattggtcaggttgctggtggtggcaggactgagaagccaatgctcaaggctggtaacgcctaccacaagtaccgtgtgaagaggaactcgtggcctaaggtgcgtggtgtggccatgaaccctgtggagcatccccacggaggaggtaaccaccagcatattggtcacgcttccactgtccgccgtgatgcaccacctggccagaaggttggtctcatcgctgctaggaggactggtcgtctcagaggccaggctgccgcctctgctgccaaggccgacaaggccacttagagctatcattgctgtttatctatggttgctgcctctagattacctgtcaaggacatgtattgcagtatggatgtcgtttttgctcggtactttggtaacctggtgatgtttgttatcagttttcgctgtcgtggtctggattcttcggtccacataaagaagattatgcttggatatttggttgtccaaaaaaaaaaaaaaaa

SEQ ID NO: 9424 - protein, 261 aa, Glycine max; identical to SEQ ID NO: 7196
  misc_feature: Ceres CLONE ID no. 1520023
  misc_feature: Ceres CDNA ID no. 40352020
  misc_feature (11)..(90): Pfam Name: Ribosomal_L2 PFAM Desc: Ribosomal Proteins L2
  misc_feature (96)..(231): Pfam Name: Ribosomal_L2_C PFAM Desc: Ribosomal Proteins L2

SEQ ID NO: 9425 - DNA, 740 bp, Zea mays
  misc_feature: Ceres CLONE ID no. 1520078
  misc_feature: Ceres CDNA ID no. 25446187
  CDS (248)..(385): REFERENCED BY SEQ ID NO: 9426
aattgatttcatcgcagagcaacttcaataacctcttttatcctttgctattgttagaaatagagatttttggtgaaaaaaatccctccaacagcttcttttaattagatgtccaactattgccatccaatattcctgcacaagatgtagaggagctgttggagggtgaaaagatacggagagcgttttttagtacttgagggagattgtaacttcatttgttgttgacttcagggctttcgtgaagatgctggttgccaagttctggagcaaagaggaccattgcaatccgagatggaccagatgtcaggaatcaaacaccctcttggcaacacagagtaataaacggataatcagcggtgataataccagatgtcatgtctaatcttagttgtgatgacaatttctcgtcttttactttcctttttttctcttggaggagtttattgaaacaaccgctgttgttgtacacttctgatacgggtacataagttctcaaatagttgtagtcacgtcacattcgttgtaaagaagaggggaaaggagaaactggtaacgttgggagtgttgtgcaatgttgaaatgatcgtgttgaattaactgaagctgatcttttttggtttgtacaaaagcagcggtatgagtacagttaggctagtcacagtgaggagtgaggattttatgtctctgtttccaaaaataccacatcagctttatgactgaacgaaaaaaaaaaaaaa

SEQ ID NO: 9426 - protein, 45 aa, Zea mays
  misc_feature: Ceres CLONE ID no. 1520078
  misc_feature: Ceres CDNA ID no. 25446187
  misc_feature: Homolog of GI Number: 50911709 NR Desc: GCN5
MLVAKFWSKEDHCNPRWTRCQESNTLLATQSNKRIISGDNTRCHV

SEQ ID NO: 9427 - DNA, 772 bp, Zea mays
  misc_feature: Ceres CLONE ID no. 1520102
  misc_feature: Ceres CDNA ID no. 25446032
  CDS (276)..(446): REFERENCED BY SEQ ID NO: 9428
aggggcgtcagatggggatgcatgcacagctcagcgcacccgatgctctctgcccacgcatcttggcaccccggacccccgcccgctccccgcctttataagcggcagcagccacggcaggtggagctcatcgcatccatccaccacgcaccccaccaacccatacccataccagaggctctctgattttacttctcagcggtagatcggctgagcgagcgagcgagcgaggcacacggagctagctaaacagagcacacggatagaaaagcaagatgtcggacggcacggcgacctgcatcgacatcatcctcgccattatcctgccgccgctcggggtcttcttcaagttcggctgcggggttgagttctggatctgccttatcctcaccttcttcggctacctccccggcatcatctacgccgtctgggccatcaccaagtagccggccggtgcgttagcatgcaatgcgcgcgcagggtgatctcgtggcgggggacgcggtgtgcgcgtgtcttgagatgtgattccttccttccttgtttagttgctgctgctcctgctggtgtagtactggtgtatccagtccttttaatttcttgattagtttgctcggctgaagaaatcaggacgcgtgcctggtgttgctgctcagctccatgtacttgtacaaccgttcctccctgcagctgctgccccttctctctttttgtttaccttggattgatggattgttaaattcgttgtttgtctcaaaaaaaaaaaaaaaaa

SEQ ID NO: 9428 - protein, 56 aa, Zea mays; identical to SEQ ID NO: 1472
  misc_feature: Ceres CLONE ID no. 1520102
  misc_feature: Ceres CDNA ID no. 25446032
  misc_feature (6)..(56): Pfam Name: UPF0057 PFAM Desc: Uncharacterized protein family UPF0057
  misc_feature: Homolog of GI Number: 56412213 NR Desc: low temperature and salt responsive protein
  misc_feature: Homolog of GI Number: 50939439 NR Desc: putative low temperature and salt responsive protein
  misc_feature: Homolog of GI Number: 50897020 NR Desc: plasma membrane protein 3
  misc_feature: Homolog of GI Number: 50897022 NR Desc: plasma membrane protein 3
  misc_feature: Homolog of GI Number: 24745954 NR Desc: low temperature and salt responsive protein
  misc_feature: Homolog of GI Number: 21314334 NR Desc: early drought induced protein
  misc_feature: Homolog of GI Number: 35186896 NR Desc: Clt1
  misc_feature: Homolog of GI Number: 6671968 NR Desc: low temperature and salt responsive protein
  misc_feature: Homolog of GI Number: 6714402 NR Desc: low temperature and salt responsive protein LTI6B

SEQ ID NO: 9429 - DNA, 829 bp, Zea mays
  misc_feature: Ceres CLONE ID no. 1520142
  misc_feature: Ceres CDNA ID no. 29191603
  CDS (144)..(563): REFERENCED BY SEQ ID NO: 9430
aactcggcacgcaggcagaggcagcatagcagcagccagctccatctatcctctttcccctcctcgcttcgcttcctcggcggattcctcctccctcgaccgtccccgtccccgtccccttccggcgcgcaagctcgcccgagatggcaaacgcgagatcgggtgtcgctgtgaatgacgagtgcatgctcaagttcggcgagctgcagtcgaagaggctgcaccgcttcctaactttcaagatggacgacaagttcaaggagatcgttgtggaccaggtcggggatcgcgctaccagctacgaggacttcacaaacagcctccccgagaatgactgccgatacgcgatctatgatttcgactttgtcactgcagaagatgtccagaagagcaggatcttctatatcctatggtccccatcctccgccaaggtgaagagcaagatgctttatgcaagctcaaaccaaaaattcaagagtgggctcaatggcattcaggtggaactgcaggctactgatgcaagtgaaatcagccttgatgagatcaaggatcgggctcgctaggcatcatcatgatcatgcatcatggacttggcctactactgtggatttgtatgccattatagacttggtgctgtgaaagactgcttgatgatttgcgggtttgttgctgtgtaaaaaaaggtcccatggctcccagaagaccatgaaggttcggatctatcatgtaattccttgttatctgccaattatgtatggactatggacatgtgttgcgctgttcaacttactactacaaataagtaatcgatgaaaaaaaaaaaaaaaaa

SEQ ID NO: 9430 - protein, 139 aa, Zea mays; identical to SEQ ID NO: 70
  misc_feature: Ceres CLONE ID no. 1520142
  misc_feature: Ceres CDNA ID no. 29191603
  misc_feature (12)..(139): Pfam Name: Cofilin_ADF PFAM Desc: Cofilin/tropomyosin
  misc_feature: Homolog of GI Number: 1419370 NR Desc: actin depolymerizing factor
  misc_feature: Homolog of GI Number: 50919483 NR Desc: putative actin depolymerizing factor
  misc_feature: Homolog of GI Number: 14906219 NR Desc: actin
  misc_feature: Homolog of GI Number: 48374972 NR Desc: putative actin depolymerizing factor
  misc_feature: Homolog of GI Number: 38564721 NR Desc: putative actin
  misc_feature: Homolog of GI Number: 50927855 NR Desc: OSJNBb0012E24.5
  misc_feature: Homolog of GI Number: 68166241 NR Desc: actin depolymerizing factor
  misc_feature: Homolog of GI Number: 21536985 NR Desc: actin depolymerizing factor 4
  misc_feature: Homolog of GI Number: 21593877 NR Desc: Actin
  misc_feature: Homolog of GI Number: 14906210 NR Desc: actin

SEQ ID NO: 9431 - DNA, 834 bp, Zea mays
  misc_feature: Ceres CLONE ID no. 1520147
  misc_feature: Ceres CDNA ID no. 29191212
  CDS (73)..(366): REFERENCED BY SEQ ID NO: 9432
aaccgccgctgttgcagttgcagaagttgcctctccttttcgtcttgtttctcctccaccccggcgacgcgaatggagaagggcagtggaggcagcaatcctccgccgccaccgctccacatggaggacttccaactggaggggaagaagcccgtcaagaacccctttgtgcccatcggcgcactggttactgctggagttctgactgctggtctgatcagtttccgatatgggaactctcagctgggtcagaaactgatgagggcacgtgtagttgctcaaggcgctacagtcgctctgatgattggcagtgcttactactatggcgatcaaatcaagctgttcaagaaagggtcgagcccatgatcttcccatgaatattgctgtttttggtgtatggaggaatgccttgtatacgcataaatttcacctggactctgctgcccctttttaacatcattttggcctgacacgtggtagctaacaagaaatcgctgttggtccgatcggcaggattgaaaataaataattttgtttgttgattttgtcaggatttgttggttgattaattaggctatatgcatcaattgttatatctttgtacaaacacgcgttctgttgtctgcaatcagcagctaaagtgaccatttcgcaattctggctagagatggcaatgaggacctgattcctcgcggtgaattctttattaggccccgtttgtttcgtagtttgtttggttagaattgaattccattttaataattgtaatttagaaaaaactaattaagtttatatatttatatatgtagtatatttgcaaaaaaaaaaaaaaaa

SEQ ID NO: 9432 - protein, 81 aa, Zea mays
  misc_feature: Ceres CLONE ID no. 1520147
  misc_feature: Ceres CDNA ID no. 29191212
  misc_feature (9)..(66): Pfam Name: HIG_1_N PFAM Desc: Hypoxia induced protein conserved region
  misc_feature: Homolog of GI Number: 50899908 NR Desc: hypoxia
  misc_feature: Homolog of GI Number: 62642313 NR Desc: zinc finger family protein
  misc_feature: Homolog of GI Number: 51859327 NR Desc: MGC99134 protein
  misc_feature: Homolog of GI Number: 72012349 NR Desc:  similar to CG9921
  misc_feature: Homolog of GI Number: 54643373 NR Desc: GA22125
  misc_feature: Homolog of GI Number: 18860015 NR Desc: CG9921
  misc_feature: Homolog of GI Number: 58380522 NR Desc: ENSANGP00000019396
MEDFQLEGKKPVKNPFVPIGALVTAGVLTAGLISFRYGNSQLGQKLMRARVVAQGATVALMIGSAYYYGDQIKLFKKGSSP

SEQ ID NO: 9433 - DNA, 727 bp, Zea mays
  misc_feature: Ceres CLONE ID no. 1520332
  misc_feature: Ceres CDNA ID no. 25446188
  CDS (215)..(538): REFERENCED BY SEQ ID NO: 9434
atccgctcctgtcctcttctctcgtcgcttcctccgtctctcggcgtcgaatctcctccaaccaccgcgcacactctactcgacgcccggtggaaggagttctccgggatttgagctgtttctgccctcacctccgctaggccggcgtcgagtggagatccaatcggaaatcgaactgacttcatcttctgttgcatccccatcaggataagccatgccaggagtgatcacaaagttcgcggttacatccatggtgatgtggatggccccggttgcgatcgtttatgggttctactaccaggcgtttccaggtgtgagtcggatgtcatcctcgacgcagacactcgccagcgggttcctggctgtcatatcagttaatctggtgatcggcttgtacatattcatggcgatgaaggagactcgacaccaggagccacagccagacccgaccttcctggcaaacgccaaagcgagtatcaaccagccaacatcctctcaaccgagtgatggttccaaggggaagggaaaggttgagtaagccgtagcatgtcatgttggtttttggtcttgtgtatgttaagtgcatgctgtttaggaggaatagttgtgcacgccataacacaacatcgcaatctttaaagttcatgattttgctgtaattcttgacaattatggtcatggagcaatatgaagttgaaacttttgtacgtaaaaaaaaaaaaaaaaa

SEQ ID NO: 9434 - protein, 107 aa, Zea mays
  misc_feature: Ceres CLONE ID no. 1520332
  misc_feature: Ceres CDNA ID no. 25446188
MPGVITKFAVTSMVMWMAPVAIVYGFYYQAFPGVSRMSSSTQTLASGFLAVISVNLVIGLYIFMAMKETRHQEPQPDPTFLANAKASINQPTSSQPSDGSKGKGKVE

SEQ ID NO: 9435 - DNA, 624 bp, Zea mays
  misc_feature: Ceres CLONE ID no. 1521050
  misc_feature: Ceres CDNA ID no. 40352021
  CDS (72)..(440): REFERENCED BY SEQ ID NO: 9436
aaccaaaggtaccttgcaatcacaacgaacagaagctctcgatctcaccgacaccgaggaagaagagatcaatggcgtccgagcagggagtcgtgatcgcgtgccacagcaaggctgagttcgacgcccacatgaccaaggcccaggaagccggcaagctggtggtcatcgacttcactgccgcctggtgcggtccatgccgcgccatcgccccactgttcgtcgaacacgccaagaagttcactcaggtcgtcttcctgaaggtggacgtggacgaagtgaaggaagtcaccgcggcctacgaggtcgaggcgatgccgaccttccacttcgtcaagaacggcaagacggtcgcgaccatcgtgggtgccaggaaggacgagctcctggcccagatcgagaagcatgccgcgcctgcgcctgcgtctgcgtctgcctaaaggagatcagtcgtcgccgtcaataagggccagcacgtatggctgtaaatgttgtcgttatcagttctggctttgtcgtttgtgggcgattgtgaactagtagtatgtttgtttctatccgagccggaggcgatacttaaccatggatacttgttgtgagttcgtttcaaaaaaaaaaaaaaaa

SEQ ID NO: 9436 - protein, 122 aa, Zea mays; identical to SEQ ID NO: 1072
  misc_feature: Ceres CLONE ID no. 1521050
  misc_feature: Ceres CDNA ID no. 40352021
  misc_feature (8)..(114): Pfam Name: Thioredoxin PFAM Desc: Thioredoxin

SEQ ID NO: 9437 - DNA, 597 bp, Zea mays
  misc_feature: Ceres CLONE ID no. 1521059
  misc_feature: Ceres CDNA ID no. 25447075
  CDS (134)..(346): REFERENCED BY SEQ ID NO: 9438
aaaaccaaacaagcagaccaccttctccacccggccggccttcgtcttcctccgatccccaggccccagccactccccgtacaagccaaagagaccagtaggtaggcaggcagttcatcgtcgatcgagcaagatgtcggactggggccccgtggtgatcgggctggtgctgttcgtgctgctctcgccggggctgctcgtccagctccccggccgccaccacttggtggagttcggcaacctgaagaccagcgccgtctccatcgtcgtccactccatcatctacttcgcgctcatcaccctcttcgtcatcgtcatcggagtgcacatcaccaccggcgactagctcgatcgatcacacgtctctgtcgattaatttcctgatcgatcggtctgcttggcttctttctttttcatctcgtgcatctgtgttactatatatactacaccataccatacacgtctttcccacctccgacccctctctgtccttcccatcagcatatatactagaatgtcgtgcgtcagcgcgtgtatgatgctgtcgaccatggcaatcgaacttaattaatttctcaacaaaaaaaaaaaaaaaaa

SEQ ID NO: 9438 - protein, 70 aa, Zea mays
  misc_feature: Ceres CLONE ID no. 1521059
  misc_feature: Ceres CDNA ID no. 25447075
  misc_feature: Homolog of GI Number: 50904308 NR Desc: P0592G05.7
  misc_feature: Homolog of GI Number: 50923841 NR Desc: OSJNBa0044M19.15
MSDWGPVVIGLVLFVLLSPGLLVQLPGRHHLVEFGNLKTSAVSIVVHSIIYFALITLFVIVIGVHITTGD

SEQ ID NO: 9439 - DNA, 529 bp, Zea mays
  misc_feature: Ceres CLONE ID no. 1521152
  misc_feature: Ceres CDNA ID no. 25445976
  CDS (87)..(317): REFERENCED BY SEQ ID NO: 9440
aacccgtcccgtggacactccactgcatccaccacaccaccagatctgctgccgtccgcgcagaggacgagagcaacttcatcgcgatgggggcggtggtgacggcggtgatcgcgatcgccgcggtggtgctcggctggatcaccatcgagatggcatgcaagccctgcctcgagaccggccgacgcgccatggaccgcgcgctcgaccccaaccacgacccggactcccccaccaacgccgccggcgcctccgccaacgagccgctcctcgccgacctctccgcctccaccgcgccacccgcaaaggccatctgaatctcatcacctcccagagcgagccagaggcggaccacccttttcccctcgccttgtaatcttgcttctttctatgtcattttgtgcttatgagtttgctattaatattaatggtgttttggttatgaaacgaccactgctagcaatatataaactacttgttcagacatccatatttacaagtgacgttgcaacctaaaaaaaaaaaaaaa

SEQ ID NO: 9440 - protein, 76 aa, Zea mays
  misc_feature: Ceres CLONE ID no. 1521152
  misc_feature: Ceres CDNA ID no. 25445976
  misc_feature: Homolog of GI Number: 78708241 NR Desc: retrotransposon protein
  misc_feature: Homolog of GI Number: 50926032 NR Desc: OSJNBa0067K08.24
  misc_feature: Homolog of GI Number: 68232943 NR Desc: SMF protein
  misc_feature: Homolog of GI Number: 2429362 NR Desc: proline rich protein
  misc_feature: Homolog of GI Number: 488731 NR Desc: chitinase
  misc_feature: Homolog of GI Number: 50940371 NR Desc: putative pherophorin
MGAVVTAVIAIAAVVLGWITIEMACKPCLETGRRAMDRALDPNHDPDSPTNAAGASANEPLLADLSASTAPPAKAI

SEQ ID NO: 9441 - DNA, 840 bp, Glycine max
  misc_feature: Ceres CLONE ID no. 1521259
  misc_feature: Ceres CDNA ID no. 25402293
  CDS (71)..(640): REFERENCED BY SEQ ID NO: 9442
attgtattggtttgggcatttggaattggtggtggtaggtttggtgcacttagatctaaaagctagaaagatgtcttttattggcactcaacaaaagtgcgaggcttgtgacaaaacagtgtaccccgttgatcagctttctgctgacggcactgcttatcacaaagcatgcttcaagtgctctcattgcaaaggaaccttgaagctcagcaactattcctccatggaaggtgttctatactgtaagcctcattatgagcaactcttcaaggagacaggatctttcaagaagaacttccagtcacctgctaagcaagctgtcaaaacaactcctgagctgacaaggtctcctagtaaagctgctagcatgttttctgggacccaagaaaagtgtgctacatgtggcaaaactgcttatcctttggagaaggtaacagtggaaggtcaggcctatcacaaatcttgtttcaaatgttcacatggcagctgtcccataactccatccaactatgcagccctggagggcgttttgtattgcaagcaccatttttcccagctttttaaggagaaagggagctataatcatcttattaaatctgcatcaatcaaacgggaagcaaactctgttccacaagcttgagtcatggtgttgtcttttgttgttattatcatctttggaataagtgtttgtgtttttttcattttgattctacttaccatgacaagtttccttcttgttcactttatatgtgggtgtcgctagtgtgcaatttacagtgtgtgatgtatttgaccaatgcacattcagtaataatagtgtgatttgcaaaaaaaaaaaaa

SEQ ID NO: 9442 - protein, 189 aa, Glycine max
  misc_feature: Ceres CLONE ID no. 1521259
  misc_feature: Ceres CDNA ID no. 25402293
  misc_feature: Useful for making plants with modulated growth and phenotype characteristics
  misc_feature: The sequence is a functional homolog of  SEQ ID NO 428 in the  10/412,699 US patent application
  misc_feature: The sequence is a functional homolog of  SEQ ID NO 504 in the  11/435,388 US patent application
  misc_feature: The sequence is a functional homolog of  SEQ ID NO 616 in the  11/435,388 US patent application
  misc_feature: The sequence is a functional homolog of  SEQ ID NO 988 in the  11/479,226 US patent application
  misc_feature: The sequence is a functional homolog of  SEQ ID NO 992 in the  11/479,226 US patent application
  misc_feature (10)..(67): Pfam Name: LIM PFAM Desc: LIM domain
  misc_feature: Homolog of GI Number: 1841464 NR Desc: LIM
  misc_feature: Homolog of GI Number: 17227092 NR Desc: LIM domain protein
  misc_feature: Homolog of GI Number: 20258945 NR Desc: putative transcription factor L2
  misc_feature: Homolog of GI Number: 21689625 NR Desc: At2g39900/T28M21.6
  misc_feature: Homolog of GI Number: 34902012 NR Desc: putative LIM
  misc_feature: Homolog of GI Number: 1890352 NR Desc: transcription factor L2
  misc_feature: Homolog of GI Number: 50911110 NR Desc: putative LIM domain protein PLIM
  misc_feature: Homolog of GI Number: 8515104 NR Desc: LIM domain protein PLIM
  misc_feature: Homolog of GI Number: 8671848 NR Desc: Contains similarity to mRNA for transcription factor L2 from Arabidopsis thaliana gbX91398.
  misc_feature: Homolog of GI Number: 28973363 NR Desc: putative LIM
  misc_feature: Useful for making bigger plants
  misc_feature: Useful for making stronger plants
MSFIGTQQKCEACDKTVYPVDQLSADGTAYHKACFKCSHCKGTLKLSNYSSMEGVLYCKPHYEQLFKETGSFKKNFQSPAKQAVKTTPELTRSPSKAASMFSGTQEKCATCGKTAYPLEKVTVEGQAYHKSCFKCSHGSCPITPSNYAALEGVLYCKHHFSQLFKEKGSYNHLIKSASIKREANSVPQA

SEQ ID NO: 9443 - DNA, 820 bp, Zea mays
  misc_feature: Ceres CLONE ID no. 1521365
  misc_feature: Ceres CDNA ID no. 25446189
  CDS (208)..(582): REFERENCED BY SEQ ID NO: 9444
aaccaggcccatttgtagcccaggcctaaccacccatttgtcgcgttcttttcacgccaacccggacccgcggccccactacccagggccaaatttccctgtgctcctctccatccagctctcctcttgctcataccgcgacgctctctctctttcgccgagctcctcgaaaccctaggagcgtgcttgaccggcggcggcgaggtgatggcgatggaccctgacgcggtagcgaaggccttcgtggagcattactaccgaacgttcgacaccaaccgcgcggcgctggttgggctgtaccaggagacctccatgctcaccttcgagggccagaagttccagggcccgtccgccattgccggcaagctcggatctctccctttccaggcctgcgagcatcagatcgtcaccgtcgactgccagccatcgggtccccagggaggcatgctcgtcttcgtctccggttccatacgcaccggccccgaggagcaccccatcaagttctcccaggcattccatttgctgccggccgctgggtccttcttcgtgcagaatgacatgttccgcctgaactatggctaaagacagccgatactcttgtgatgaaggaattgtttaagggtttcatgttgaaacgatgaatacttaatgttgccgctactctggtctcttttgtatcttctttgttggctgcttcactgtattacaagaaattgctagacttggattatttcagttgttttgaatcatgtactggttgcaccatttctttgtggaatgtgaattgaaacggtcgtagctacaaaaaaaaaaaaaaaaa

SEQ ID NO: 9444 - protein, 122 aa, Zea mays; identical to SEQ ID NO: 214
  misc_feature: Ceres CLONE ID no. 1521365
  misc_feature: Ceres CDNA ID no. 25446189
  misc_feature (6)..(119): Pfam Name: NTF2 PFAM Desc: Nuclear transport factor 2
  misc_feature: Homolog of GI Number: 50947933 NR Desc: nuclear transport factor 2
  misc_feature: Homolog of GI Number: 21555203 NR Desc: nuclear transport factor 2
  misc_feature: Homolog of GI Number: 12323001 NR Desc: nuclear transport factor 2
  misc_feature: Homolog of GI Number: 18377444 NR Desc: similar to nuclear transport factor 2
  misc_feature: Homolog of GI Number: 34908774 NR Desc: putative Nuclear transport factor 2
  misc_feature: Homolog of GI Number: 25402667 NR Desc: protein T23J18.22
  misc_feature: Homolog of GI Number: 21748151 NR Desc: putative nuclear transport factor 2
  misc_feature: Homolog of GI Number: 57228672 NR Desc: nuclear transport factor 2
  misc_feature: Homolog of GI Number: 45187886 NR Desc: ADR013Wp
  misc_feature: Homolog of GI Number: 62651812 NR Desc:  similar to Chain A
  misc_feature: Useful for delaying flowering time
  misc_feature: Useful for increasing chlorophyll and photosynthetic capacity
  misc_feature: Useful for making ornamental plants with modified leaves
  misc_feature: Useful for making plants with increased biomass and foliage
  misc_feature: Useful for making plants with increased biomass and foliage
  misc_feature: Useful for making plants with increased biomass and foliage
  misc_feature: Useful for making shorter plants

SEQ ID NO: 9445 - DNA, 688 bp, Zea mays
  misc_feature: Ceres CLONE ID no. 1522211
  misc_feature: Ceres CDNA ID no. 25447017
  CDS (71)..(460): REFERENCED BY SEQ ID NO: 9446
attcctcggagagggagaagccgccgccgcagcaatcacagcagcccggagaaagcccaggtccgacaagatgcagatcttcgtgaagacgctgacagggaagaccatcaccctcgaggtcgagagcagcgacaccatcgacaatgtcaaggccaagatccaggacaaggaagggatcccgccggaccagcagcggctgatctttgccgggaagcagctggaggatggccgcacccttgcggactataacatccaaaaggagtctacgcttcacctcgtgcttaggctccgcggtggcatcattgagccctcgctgcaggcgctcgctcgcaagtacaaccaggacaagatgatctgccgcaaatgctatgcacgactgcaccctagggctgtcaactgccgcaagaagaagtgtggtcacagcaaccagctgagggccaagaagaagatcaagaactgaggtgctgctcctagtcagtttcatggacaatgttgggctgtattgctgtgtggttgttgaaccgtgtttgtttacccaacatttgggccttctgttatgttttaccttgttgtcgatgacacaatactatatgacaatagcaactctgttattgtagttttggtcactgttcacctgatatgtgccatatttcggtaagtatcgttagtgggcaaaaaaaaaaaaaaa

SEQ ID NO: 9446 - protein, 129 aa, Zea mays; identical to SEQ ID NO: 434
  misc_feature: Ceres CLONE ID no. 1522211
  misc_feature: Ceres CDNA ID no. 25447017
  misc_feature (1)..(74): Pfam Name: ubiquitin PFAM Desc: Ubiquitin family
  misc_feature (77)..(128): Pfam Name: Ribosomal_L40e PFAM Desc: Ribosomal L40e family
  misc_feature: Homolog of GI Number: 52077170 NR Desc: ubiquitin / ribosomal protein CEP52
  misc_feature: Homolog of GI Number: 71040673 NR Desc: ubiquitin fusion protein
  misc_feature: Homolog of GI Number: 322750 NR Desc: ubiquitin / ribosomal protein CEP52
  misc_feature: Homolog of GI Number: 16323384 NR Desc: putative ubiquitin extension protein UBQ1
  misc_feature: Homolog of GI Number: 395079 NR Desc: ubiquitin/ribosomal protein
  misc_feature: Homolog of GI Number: 76559884 NR Desc: TPA: ubiquitin
  misc_feature: Homolog of GI Number: 50920549 NR Desc: Putative ubiquitin / ribosomal protein CEP52
  misc_feature: Homolog of GI Number: 13569612 NR Desc: ubiquitin A
  misc_feature: Homolog of GI Number: 73954303 NR Desc:  similar to ubiquitin A
  misc_feature: Homolog of GI Number: 498793 NR Desc: ubiquitin

SEQ ID NO: 9447 - DNA, 902 bp, Zea mays
  misc_feature: Ceres CLONE ID no. 1522325
  misc_feature: Ceres CDNA ID no. 25446190
  CDS (141)..(662): REFERENCED BY SEQ ID NO: 9448
aagcacaagccgcaccgcaattagccgcgaccctccgcagaatcggctcacgtttccgatccagaggtccagactgttccccgagttttcccactgtgtcctctcctcgcgagtcccggcgaagcaggcgaaccgcgaacatgtgccccaccggcaggtacctggggctcgacctctccggcgctggcggcgacctgaggccggcgttcgacgtgcttgacgcggaccgggacggccggatcagccgggacgacctcaagtccttctacgccgccgcggggcccgccgccggcgaccggttcgacgacgacgacctcgcggccatgatcgcggccgccgacgccgaccgcgacggcttcgtgcagtacgacgagttcgagcgcctgctggccggccgcgccgcggcggccgccgccgccgcgggaggcgctgggcgccgctccgccatggagggcgccttccggctcatggaccgggacggggacggtatggtcggcttcgaggacctcaaggcctacctcgactgggccgggatgcccgcggcggacgaggaggtccgcgccatgatccgcgtcgctggcggaggggacggcggtgaaggcgtggggctcgaggcgctagccggagtgctcgcggtcgacctggaaggcatcgccttttgattttgagagatccatgggctgttgtgcggagtactgtattctttttcttggggttttcggttggtgagcgtggtgcgttgtctgtcgattgtctgtggttgactggggttcacggaggaccattcaaaacgagataaaaagttcgcatgatggccgtttgagatgctttctctggacccgacaatcacatatcagacattgcaaagtccaatgggagtttatatcaaaaaaaaaaaaaaa

SEQ ID NO: 9448 - protein, 173 aa, Zea mays
  misc_feature: Ceres CLONE ID no. 1522325
  misc_feature: Ceres CDNA ID no. 25446190
  misc_feature (58)..(86): Pfam Name: efhand PFAM Desc: EF hand
  misc_feature: Homolog of GI Number: 5702231 NR Desc: hypersensitive reaction associated Ca2+
  misc_feature: Homolog of GI Number: 10177614 NR Desc: NaCl
  misc_feature: Homolog of GI Number: 2352828 NR Desc: NaCl
  misc_feature: Homolog of GI Number: 50904487 NR Desc: B1147A04.10
  misc_feature: Homolog of GI Number: 67985765 NR Desc: Pantoate
  misc_feature: Homolog of GI Number: 66780099 NR Desc: PE
  misc_feature: Homolog of GI Number: 66776103 NR Desc: LigA
  misc_feature: Homolog of GI Number: 67985322 NR Desc: Prolyl
  misc_feature: Homolog of GI Number: 53767310 NR Desc: COG1309: Transcriptional regulator
  misc_feature: Homolog of GI Number: 50904483 NR Desc: B1147A04.8
MCPTGRYLGLDLSGAGGDLRPAFDVLDADRDGRISRDDLKSFYAAAGPAAGDRFDDDDLAAMIAAADADRDGFVQYDEFERLLAGRAAAAAAAAGGAGRRSAMEGAFRLMDRDGDGMVGFEDLKAYLDWAGMPAADEEVRAMIRVAGGGDGGEGVGLEALAGVLAVDLEGIAF

SEQ ID NO: 9449 - DNA, 649 bp, Zea mays
  misc_feature: Ceres CLONE ID no. 1522418
  misc_feature: Ceres CDNA ID no. 36690969
  CDS (62)..(472): REFERENCED BY SEQ ID NO: 9450
aaccgcaatcttcaatctccccagcaatccctagcagaagccttccatcctcactcgctcgatggcccgcacgaagcagacggcgaggaagtccaccggcggcaaggcgccgaggaagcagctggcgactaaggcggcccgcaagtctgcccctgcgaccggcggagtgaagaagccccaccgcttccgccccggcaccgtcgcgctccgggagatccgcaagtaccagaagagcacggagctgctgatccgcaagctgccgttccagcgcctggtgcgggagatcgcgcaggacttcaagaccgacctacgcttccagagctctgctgtctccgcgctgcaggaggcggctgaggcctaccttgtcgggctcttcgaggacaccaacctctgcgccatccacgccaagcgcgtcaccatcatgcccaaggacatccagcttgcccgccgcatccgcggggagagggcctaagcgtcatattttctgtcatcagtgcccgatcagaagatgtagagatatgctgggttctgtagtttgggttacttcgaatcatcgagtgttggctgttcactgctgtaacttaattatcatgatgcatatgaaatggcaatgaactctgttatcagttctgaaaaaaaaaaaaaaaaa

SEQ ID NO: 9450 - protein, 136 aa, Zea mays; identical to SEQ ID NO: 588
  misc_feature: Ceres CLONE ID no. 1522418
  misc_feature: Ceres CDNA ID no. 36690969
  misc_feature (58)..(134): Pfam Name: Histone PFAM Desc: Core histone H2A/H2B/H3/H4
  misc_feature: Homolog of GI Number: 59799581 NR Desc: Histone H3
  misc_feature: Homolog of GI Number: 166384 NR Desc: histone H3
  misc_feature: Homolog of GI Number: 1362108 NR Desc: histone H3 homolog
  misc_feature: Homolog of GI Number: 55775689 NR Desc: histone 3
  misc_feature: Homolog of GI Number: 122083 NR Desc: Histone H3
  misc_feature: Homolog of GI Number: 50960584 NR Desc: HIST2H3C protein
  misc_feature: Homolog of GI Number: 61842355 NR Desc:  similar to HIST1H3I protein
  misc_feature: Homolog of GI Number: 122070 NR Desc: Histone H3
  misc_feature: Homolog of GI Number: 68362812 NR Desc:  similar to CG31613
  misc_feature: Homolog of GI Number: 50728592 NR Desc:  similar to histone protein Hist2h3c1

SEQ ID NO: 9451 - DNA, 795 bp, Zea mays
  misc_feature: Ceres CLONE ID no. 1522440
  misc_feature: Ceres CDNA ID no. 25446191
  CDS (183)..(611): REFERENCED BY SEQ ID NO: 9452
aaccacccaaacccaagcagagaagcagagacacatttggctcactcactcacactcactcgctcatagattgtcctgtccgtccatcatctctagctagcagcttccagtgagagcggcaagcgacaccacaaccagacaacacaccaccaccgagctgtgagaataagttcgcagacaggatgggcaagctgtggacgatcctcactcacctccactccctagcagggccaacggtgatgctgctgtaccctctgtacgcgtccgtgcgggcgatggagagcccgtccaagctggacgacgagcagtggctcgcctactggatcctctactccttcgtcacgctcatggagatgctcctcgagtccctcatatactggatccccatctggtacgagctcaagctgctgttcatcgcgtggctcgtgctccccaacttcaggggcgccgccttcatctacgacaagttcgtgcgcgagcagctccggaagcacggcctcaccgccgccggctccgtcaagtcgtcgtcgccgtcgtccaaggacaaggacaagcccaagaacaagttcctcgccttcgtcacgcccaagaaggatcatgaagcttactgaagtgggttgcagtgatcccattcctggaccatgtcccggcaacctgtagtgcactccactagatttctgttgtgtttgttctcgacttgaaatagagcccgttcgatgtgtgtgtggccattctgtatgtgtgagcatcaactctaacatggaatggagacaagtgccaaaaaaaaaaaaaaaa

SEQ ID NO: 9452 - protein, 142 aa, Zea mays
  misc_feature: Ceres CLONE ID no. 1522440
  misc_feature: Ceres CDNA ID no. 25446191
  misc_feature (4)..(101): Pfam Name: TB2_DP1_HVA22 PFAM Desc: TB2/DP1
  misc_feature: Homolog of GI Number: 77551026 NR Desc: abscisic acid
  misc_feature: Homolog of GI Number: 57012754 NR Desc: HVA22 protein
  misc_feature: Homolog of GI Number: 57012614 NR Desc: HVA22
  misc_feature: Homolog of GI Number: 57012623 NR Desc: HVA22
  misc_feature: Homolog of GI Number: 7269346 NR Desc: abscisic acid
  misc_feature: Homolog of GI Number: 50946659 NR Desc: putative abscisic acid
  misc_feature: Homolog of GI Number: 51536079 NR Desc: putative abscisic acid
  misc_feature: Homolog of GI Number: 57899745 NR Desc: abscisic acid
  misc_feature: Homolog of GI Number: 77551799 NR Desc: AtHVA22a
  misc_feature: Homolog of GI Number: 51535536 NR Desc: putative abscisic acid
MGKLWTILTHLHSLAGPTVMLLYPLYASVRAMESPSKLDDEQWLAYWILYSFVTLMEMLLESLIYWIPIWYELKLLFIAWLVLPNFRGAAFIYDKFVREQLRKHGLTAAGSVKSSSPSSKDKDKPKNKFLAFVTPKKDHEAY

SEQ ID NO: 9453 - DNA, 852 bp, Zea mays
  misc_feature: Ceres CLONE ID no. 1522791
  misc_feature: Ceres CDNA ID no. 25445977
  CDS (111)..(587): REFERENCED BY SEQ ID NO: 9454
aaaaaaaaaaaaaaaaaaatccgagagagctccacaggccaggtccccatcgccgcggcgcttgccccacctctcccccgcccggtagtagcctcgccgccgttgccgagatggggttcgtgtccttcgtcgggagggtgctcttcgtcgccgctttcctcctctccgcctaccaggagtttaatgaattcggtgctgatggtggaccagcagctaaggcccttcggcccaaattcaacgtgtttgtcaaaaatgtatctgctcatctgggagtagctgtgccacacattgagttgaagcatgtgattgctgctacaattggtcttaagggtcttggaagcctcctttttattttgagcagctctctcggtgcttatctcctgctgctgtaccttgctttgatcactcctatcatccatgacttctacaactacgatatggagaaggcagaatttgcaggcctctttgcgaagttcacccaggatttggcgctgatcggagctctgctcttctttctgggcatgaagaactccatcccgaagcggcagggcggcaagaagaaggcccccaaggcgaagacgaactagggctgcttagatagctgcacgcctcaggcggggtgtatcaggccacaggtctatttcgaagcaggcccagcgcgatgcagcgaatgccatcgagctgcgcttttacatgtttatcatcagattccattttgcggggcacggcccggacaaaggtgtgaccggggtgggttaggcgactagattgcacgattatgtacttgcgatttgtttgttgaactgggttgccgacagttaatcttcatttgatttaaaaaaaaaaaaaaaa

SEQ ID NO: 9454 - protein, 158 aa, Zea mays
  misc_feature: Ceres CLONE ID no. 1522791
  misc_feature: Ceres CDNA ID no. 25445977
  misc_feature (1)..(138): Pfam Name: HR_lesion PFAM Desc: HR
  misc_feature: Homolog of GI Number: 78708743 NR Desc: HR
  misc_feature: Homolog of GI Number: 31432358 NR Desc: putative RNA
  misc_feature: Homolog of GI Number: 50930299 NR Desc: OSJNBa0027O01.6
  misc_feature: Homolog of GI Number: 21553825 NR Desc: elicitor like protein
  misc_feature: Homolog of GI Number: 20147297 NR Desc: At1g04340/F19P19_23
  misc_feature: Homolog of GI Number: 21592798 NR Desc: Nicotiana lesion
  misc_feature: Homolog of GI Number: 33589726 NR Desc: At5g43460/MWF20_18
  misc_feature: Homolog of GI Number: 40287494 NR Desc: putative lesion
  misc_feature: Homolog of GI Number: 7939528 NR Desc: HR
MGFVSFVGRVLFVAAFLLSAYQEFNEFGADGGPAAKALRPKFNVFVKNVSAHLGVAVPHIELKHVIAATIGLKGLGSLLFILSSSLGAYLLLLYLALITPIIHDFYNYDMEKAEFAGLFAKFTQDLALIGALLFFLGMKNSIPKRQGGKKKAPKAKTN

SEQ ID NO: 9455 - DNA, 874 bp, Zea mays
  misc_feature: Ceres CLONE ID no. 1523149
  misc_feature: Ceres CDNA ID no. 36707304
  CDS (464)..(601): REFERENCED BY SEQ ID NO: 9456
actgctgtagtggacgtggactacaacaaatgcaagccgtgccctgcactgcactcactcctccctgctgtcctgcacccgttggcacaggagtcaagcccgtccgttcttgttcatcggtggttgcagacagcacggccgatcaccgcgtctgcacttttaattttttttgaaagacagcgtgggggtgcccaggccgcagcacgagcctgaagaggaggagcaggagcaggtggacgcggcgttgatcggaggcagcgacccggagtacgccgagtgcgcgcgcgccgccggcaggagcgcgtcctggtgccggtcggtggccgtcacgttcacggtcgtcctgctgctgaggcacctggtcaccgtggtcacggtcggagcggccaaccagttcgccttcggtctcctcacggtatacttgctgcgggcgagcgggatcctgcttccgttctacctcgtcatgaggctcatctccgtgatccagcaggggcagaggcagtaccgcctccggctgctccaggagcagaggaggcacgcgttgaggtcggcccggctgcacggccaggaacaggaacagcatgtcatcctggttcgctgaggaacgagccattcattcaccttggtgtccatacattccattcatccgtcgtacgcgtacaaggttgtaagatgtaccactccatttttttgttcaggcctttacaagcctaaaaaaagcttatatgtaccaccacttcatttgtaaaccctcaaaatttgttgctgagaagatcgacatatcatgtatagatttgaaaaaagaaacaaacaaaaaaaaaaggggaaagagaactggcgcaatgttcgattaaaaaaagaaaaaaaaaaaaaa

SEQ ID NO: 9456 - protein, 45 aa, Zea mays
  misc_feature: Ceres CLONE ID no. 1523149
  misc_feature: Ceres CDNA ID no. 36707304
  misc_feature: Homolog of GI Number: 34905532 NR Desc: B1146F03.23
  misc_feature: Homolog of GI Number: 52077476 NR Desc: zinc finger protein
  misc_feature: Homolog of GI Number: 4741923 NR Desc: PIT1
MRLISVIQQGQRQYRLRLLQEQRRHALRSARLHGQEQEQHVILVR

SEQ ID NO: 9457 - DNA, 593 bp, Zea mays
  misc_feature: Ceres CLONE ID no. 1524063
  misc_feature: Ceres CDNA ID no. 25446192
  CDS (2)..(331): REFERENCED BY SEQ ID NO: 9458
agccaaaggaaggcttgtgttgtgtttggctagggtttgctcgcgtctcctccttcccttggctgctgtcgtgccggtcggcggcgacatgtcgaagaagaacaatcttgccaagaggaagaagcagtacgagttcgacctccaacgggagaaggaggccaaggagaagcaggccaagaagctgcaagccaagaaatccaagatgaagatagatggtgctgaaaagaaacgtaaaggtggccaatttaaggtcggcaagaaaaaggtgaagacgaaactttcagccttagcaaaagccaaagccgcgcaagccatggaggtcgacaagtgactgcggagcacaagcatcatcagcttaatcgtcgagccagagttggaactctgaattctgtgcccacatgaatagctcccgtcgggtgcagctgcagcttgttgaacctttctttctaaaaagaatgtcattcttgcttttttaagggtaatcaagctctagttataggttttggtgataacgactatgatgttagagaactaatgagatttatggagctaaatgaaaaagagaaaaatacatgtgaaaaaaaaaaaaaaaa

SEQ ID NO: 9458 - protein, 80 aa, Zea mays; identical to SEQ ID NO: 848
  misc_feature: Ceres CLONE ID no. 1524063
  misc_feature: Ceres CDNA ID no. 25446192

SEQ ID NO: 9459 - DNA, 511 bp, Zea mays
  misc_feature: Ceres CLONE ID no. 1524360
  misc_feature: Ceres CDNA ID no. 25446193
  CDS (135)..(287): REFERENCED BY SEQ ID NO: 9460
acggacacatattgctgacatggcttgcttgcaggctacccgacggcaggcgcggagcagcagggaggcagcggcaggaagcagggacgccgggggaagacgacctcgcgcggggagaagggcttcatcgaaggatgcatcgcggcgctctgctgctgctggatctgcgagatgtgctgcgactaggcagcccccccttccctccgccgccaggctttgagcctttgacaggaacggagagatctgctccacccatagctgcagttgtggctgcacgtacttgttgagctgttgtgttgtgtccatctcggtactttttgatttgttattagtagtagctgtgatgacgatgcatgggctgctctgtcttctgcagctctagcattacactcactactacgtgtgcgtgttgtaccgttttgtattgagtggtgacttgaaggtggcgctggtgatttgtactaccttctatatatgcatactccttggtacgcaaaaaaaaaaaaaaaaa

SEQ ID NO: 9460 - protein, 50 aa, Zea mays
  misc_feature: Ceres CLONE ID no. 1524360
  misc_feature: Ceres CDNA ID no. 25446193
MHRGALLLLDLRDVLRLGSPPFPPPPGFEPLTGTERSAPPIAAVVAARTC

SEQ ID NO: 9461 - DNA, 656 bp, Zea mays
  misc_feature: Ceres CLONE ID no. 1524397
  misc_feature: Ceres CDNA ID no. 25446194
  CDS (166)..(387): REFERENCED BY SEQ ID NO: 9462
aaaaaaaaaaaaaaagaaacgcgttgttttcctcttttccccaaggcaaccaaaccatctcgattctcgactcgtggggaagtttcgctctcgccggcgtcgacggcctagggttcgaggaacgtccgtccgtccgtccggggaaggagcggtagggaggcggagatgatcgaggtggtgctcaacgaccgcctggggaagaaggtgcgggtcaagtgcaacgaggacgacaccatcggcgacctcaagaagctggtggcggcgcagacggggacgcgccccgagaagatccgcatccagaagtggtacaacatctacaaggaccacatcaccctcaaggactacgaggtccacgacggcatgggcctcgagctctactacaactgagccgccgcccctctctccctctcgtcaggttggtctgaattctgaagtcatgggtgcaattcgcttcgcggtgatctcttaagctcatcacatatataaaagcaacctcagtgggctatgtaagacatggcgtgccaaactatcagtgaccactgacagctttgcaatacgttgttgtatggtcaacctgcaaacttggtgtactgctactcgtactataaataacatagggttttaaccttggttgtggtgaaaaaaaaaaaaaaaaa

SEQ ID NO: 9462 - protein, 73 aa, Zea mays; identical to SEQ ID NO: 6826
  misc_feature: Ceres CLONE ID no. 1524397
  misc_feature: Ceres CDNA ID no. 25446194
  misc_feature (2)..(71): Pfam Name: ubiquitin PFAM Desc: Ubiquitin family
  misc_feature: Homolog of GI Number: 77553656 NR Desc: Ubiquitin family
  misc_feature: Homolog of GI Number: 77548651 NR Desc: Ubiquitin family
  misc_feature: Homolog of GI Number: 10177015 NR Desc: ubiquitin
  misc_feature: Homolog of GI Number: 50910751 NR Desc: ubiquitin
  misc_feature: Homolog of GI Number: 56501213 NR Desc: ubiquitin
  misc_feature: Homolog of GI Number: 23509060 NR Desc: ubiquitin
  misc_feature: Homolog of GI Number: 71026115 NR Desc: ubiquitin
  misc_feature: Homolog of GI Number: 55648207 NR Desc:  similar to ubiquitin
  misc_feature: Homolog of GI Number: 65303474 NR Desc: ubiquitin
  misc_feature: Homolog of GI Number: 63635477 NR Desc:  similar to Chain A

SEQ ID NO: 9463 - DNA, 618 bp, Zea mays
  misc_feature: Ceres CLONE ID no. 1524433
  misc_feature: Ceres CDNA ID no. 36703609
  CDS (123)..(293): REFERENCED BY SEQ ID NO: 9464
aaaaaaaaaaaaaaaaaaaaaaaaaaaaaaaaaaaaaaaaaaaaaaaaaaaaaaaatctttttcttcctcgcgccgccgccgccgtgacggaaggaagaggaggagcaaggagcacgacgcgatgggtcactccaacgtttggaactcgcaccctaagaactacggccctggctcccgcgtctgccgggtctgcgcgaaccctcacggtctgatcaggaagtacgggctcatgtgctgcaggcagtgcttccgcagcaacgccaaggacattggtttcatcaagtaccgttgaagaggccactgtgctgctgtggagaacttcctacatcaaagaaatgggtccttcattagaaggcctaatttatgcgctttagctttttgttcagaacttgagactcatgtgttaaactcgacttgttaaagttttgatggctactttgtgcttgttggaccagctataatcagaagattgaaattttctcactcatgatgtttgttcttatcctgcgtgtatgctcagttttctttcttgagttactgtattacctgggtaactgttcctcacttcatggatgattctgctgaagttgaatgatgactaaaaaaaaaaaaaaaaa

SEQ ID NO: 9464 - protein, 56 aa, Zea mays; identical to SEQ ID NO: 454
  misc_feature: Ceres CLONE ID no. 1524433
  misc_feature: Ceres CDNA ID no. 36703609
  misc_feature (3)..(56): Pfam Name: Ribosomal_S14 PFAM Desc: Ribosomal protein S14p/S29e
  misc_feature: Homolog of GI Number: 31745220 NR Desc: putative ribosomal protein S29
  misc_feature: Homolog of GI Number: 77555907 NR Desc: ribosomal protein S14p/S29e
  misc_feature: Homolog of GI Number: 57471722 NR Desc: ribosomal protein S29
  misc_feature: Homolog of GI Number: 13194826 NR Desc: putative ribosomal S29 protein
  misc_feature: Homolog of GI Number: 51970282 NR Desc: ribosomal S29 subunit
  misc_feature: Homolog of GI Number: 51971827 NR Desc: ribosomal S29 subunit
  misc_feature: Homolog of GI Number: 61654760 NR Desc: S29
  misc_feature: Homolog of GI Number: 47026945 NR Desc: ribosomal protein S29
  misc_feature: Homolog of GI Number: 32400973 NR Desc: ribosome protein S29

SEQ ID NO: 9465 - DNA, 506 bp, Zea mays
  misc_feature: Ceres CLONE ID no. 1524617
  misc_feature: Ceres CDNA ID no. 29191213
  CDS (80)..(250): REFERENCED BY SEQ ID NO: 9466
acctagaaaaaagagtcataagccaggtcagactaggttagggtttacctgtgaggcctgctcccctgccgccgccgccatgggacactccaacgtgtggaactcgcaccccaagaactacggccctggatctagggtttgccgtgtgtgcgctaacccccacggcttgatccgaaagtacgggctcatgtgctgcagacagtgcttccgcagcaacgccaaggacattggcttcatcaagtaccgctgaaacttggggagctccaaagcatggcaataatggaagcatggatggggacctaaaagatagcctgtactcttattcttatgataaaaccatgtaatgaattgtttggctttgtgtggacgaagttggtgtattctagatggtactcttgaatcttgatgcttccctgctatgctagctgagcatgtcgaaccgctatgaatcagacaatacagtatcaatgttaccactcagtcttgttaaaaaaaaaaaaaaaaaa

SEQ ID NO: 9466 - protein, 56 aa, Zea mays; identical to SEQ ID NO: 454
  misc_feature: Ceres CLONE ID no. 1524617
  misc_feature: Ceres CDNA ID no. 29191213
  misc_feature (3)..(56): Pfam Name: Ribosomal_S14 PFAM Desc: Ribosomal protein S14p/S29e
  misc_feature: Homolog of GI Number: 31745220 NR Desc: putative ribosomal protein S29
  misc_feature: Homolog of GI Number: 77555907 NR Desc: ribosomal protein S14p/S29e
  misc_feature: Homolog of GI Number: 57471722 NR Desc: ribosomal protein S29
  misc_feature: Homolog of GI Number: 13194826 NR Desc: putative ribosomal S29 protein
  misc_feature: Homolog of GI Number: 51970282 NR Desc: ribosomal S29 subunit
  misc_feature: Homolog of GI Number: 51971827 NR Desc: ribosomal S29 subunit
  misc_feature: Homolog of GI Number: 61654760 NR Desc: S29
  misc_feature: Homolog of GI Number: 47026945 NR Desc: ribosomal protein S29
  misc_feature: Homolog of GI Number: 32400973 NR Desc: ribosome protein S29

SEQ ID NO: 9467 - DNA, 585 bp, Zea mays
  misc_feature: Ceres CLONE ID no. 1525029
  misc_feature: Ceres CDNA ID no. 25445978
  CDS (98)..(439): REFERENCED BY SEQ ID NO: 9468
aaagctctcaaatatctctcaccacctctcccctcagcttctccccacctttggtcaggcaggctcaggcaaagggggcggccaacaaggacgagcgatggcgaccaaggtcatctgcttccttgtgctcgcatccctgctcctcgccgtcgcctttcccgtgtctgctctgcggcagcaggtgaagaagggcggcggcggcggtggtggcggaggcagtgttagcggaagcggaggcggcaacctgaatccctgggagtgctcgcccaagtgcgggtcgcggtgctccaagacgcagtacaggaaggcctgcctcaccttatgcaacaagtgctgcgccaagtgcctctgcgtgccaccggggttctacggcaacaagggcgcctgcccctgctacaacaactggaaaaccaaggaaggagggcccaagtgcccctagaataagatccaccgcagctcccgtccgccattgtccccccttctccgaatctggaacgtgttgttcatcttcgaccaccccctaggcttggcattttattactagtataatgctagtgtccgcccgttgttaaaaaaaaaaaaaaa

SEQ ID NO: 9468 - protein, 113 aa, Zea mays
  misc_feature: Ceres CLONE ID no. 1525029
  misc_feature: Ceres CDNA ID no. 25445978
  misc_feature (2)..(113): Pfam Name: GASA PFAM Desc: Gibberellin regulated protein
  misc_feature: Homolog of GI Number: 48375076 NR Desc: gibberellin
  misc_feature: Homolog of GI Number: 53793182 NR Desc: putative gibberellin induced protein 3
  misc_feature: Homolog of GI Number: 59042581 NR Desc: GASA2
  misc_feature: Homolog of GI Number: 16516823 NR Desc: Gip1
  misc_feature: Homolog of GI Number: 56236466 NR Desc: Gip1
  misc_feature: Homolog of GI Number: 55584076 NR Desc: Gasa4
  misc_feature: Homolog of GI Number: 16516825 NR Desc: Gip1
  misc_feature: Homolog of GI Number: 50251529 NR Desc: putative gibberellin
  misc_feature: Homolog of GI Number: 16516819 NR Desc: putative gibberellin induced protein 2
  misc_feature: Homolog of GI Number: 16516821 NR Desc: gibberellin induced protein 3
MATKVICFLVLASLLLAVAFPVSALRQQVKKGGGGGGGGGSVSGSGGGNLNPWECSPKCGSRCSKTQYRKACLTLCNKCCAKCLCVPPGFYGNKGACPCYNNWKTKEGGPKCP

SEQ ID NO: 9469 - DNA, 678 bp, Zea mays
  misc_feature: Ceres CLONE ID no. 1525356
  misc_feature: Ceres CDNA ID no. 25446195
  CDS (79)..(606): REFERENCED BY SEQ ID NO: 9470
aaaccactactccgcatctactgacgccgccgccgccgccgccgcgctctctccgtcggactagtcagaggatccgtcatggcgaagaaccccaaggtgttcttcgacatcctcatcggcaagtccaaggccgggcgggtcgtgatggagctcttcgccgacaaggtgcccaagacggccgagaacttccgctgcctgtgcacgggcgagaagggcctgggctccgcggggaagccgctgcactacaagggctcggccttccaccgcgtcatcccgggcttcatgtgccagggcggcgacttcacccggggcaacggcacgggcggcgagtccatctacggcgccaggttcgccgacgagaacttcaagctgcgccacacgggacccggcgtgctctccatggccaacgcggggcccgacaccaacggctcccagttcttcatctgcaccgcgcagacgccctggcttgacggcaagcacgtcgtcttcggcaaggtcgtcgatggctacgccgtcgtggacaagatggaggctgtcggttctcagtcaggtgccacggccgagagcgtacgcatcgaggactgcggccagcttgccgacgactgagggcctcgctgtgtccgattgtaaccaaatgaatgatcaataaatttctttctttcaaaaaaaaaaaaaaaa

SEQ ID NO: 9470 - protein, 175 aa, Zea mays
  misc_feature: Ceres CLONE ID no. 1525356
  misc_feature: Ceres CDNA ID no. 25446195
  misc_feature (6)..(172): Pfam Name: Pro_isomerase PFAM Desc: Cyclophilin type peptidyl
  misc_feature: Homolog of GI Number: 52076094 NR Desc: peptidylprolyl isomerase
  misc_feature: Homolog of GI Number: 55247974 NR Desc: cyclophilin 1
  misc_feature: Homolog of GI Number: 1305457 NR Desc: cytosolic cyclophilin
  misc_feature: Homolog of GI Number: 20465725 NR Desc: putative peptidylprolyl isomerase
  misc_feature: Homolog of GI Number: 11270314 NR Desc: peptidylprolyl isomerase
  misc_feature: Homolog of GI Number: 18076088 NR Desc: cyclophilin
  misc_feature: Homolog of GI Number: 1480465 NR Desc: cyclophilin Ovcyp
  misc_feature: Homolog of GI Number: 1563719 NR Desc: cyclophylin
  misc_feature: Homolog of GI Number: 1220142 NR Desc: cyclophilin
  misc_feature: Homolog of GI Number: 52788398 NR Desc: cyclophilin
  misc_feature: Useful for delaying flowering time
  misc_feature: Useful for making larger plants
  misc_feature: Useful for making ornamental plants with modified leaves
  misc_feature: Useful for making plants with increased biomass and foliage
MAKNPKVFFDILIGKSKAGRVVMELFADKVPKTAENFRCLCTGEKGLGSAGKPLHYKGSAFHRVIPGFMCQGGDFTRGNGTGGESIYGARFADENFKLRHTGPGVLSMANAGPDTNGSQFFICTAQTPWLDGKHVVFGKVVDGYAVVDKMEAVGSQSGATAESVRIEDCGQLADD

SEQ ID NO: 9471 - DNA, 835 bp, Zea mays
  misc_feature: Ceres CLONE ID no. 1525368
  misc_feature: Ceres CDNA ID no. 25446196
  CDS (40)..(681): REFERENCED BY SEQ ID NO: 9472
aagagagagaggaccaaggcacaaggcaggcagccagccatgggcaaggactgcggcaaccacggggacgatgacttccggcagtcatgccggcgcctgctggccatccttctgaccatggcgctgctggtgggcgtcgtggcgctgatcgtgtacctggtgctccgccccacgcacccgcgcttctacctgcaggacgcggcgctgcggcagctggacctgagcaacggctcggccccgctgctgtccacggcggcgcaggtcaccgtggcgtcccgcaaccccaacggccgcgtcggcgtctactacgaccgcctcgacgtctacgccacgtacaagtaccagcaggtgacgctggcgtccaggctgcccacggtgtaccagggccacggcgacgtcgacgtctggtcgcccgtgctggccggccccgccgtccccttcgcgcccttcctcgccgacgcgctcgccaaggacctcgccgcggggtacctcgtcctgcagctcaggatcgacgggagggtccgctggaaggtcggcagctgggtgtcgggccactaccacatgttcgtcacctgcccggcttacttcatcagctccggcgccggctccggctaccgtggcgctgtcggcgcgcacgggctcaggttccagaccaccacgtactgccgcgtcgaggtctagactctagcgagcgagaggtcgatcaccgagaccgcccgacctccacgtgctctgctccggccgcgccgccgaggtaggccacaccttgtcatgtcgcatactgcaaagcggaaacaaatgaagtgatacagaggttggaaaaaaaaaaaaaaaa

SEQ ID NO: 9472 - protein, 213 aa, Zea mays
  misc_feature: Ceres CLONE ID no. 1525368
  misc_feature: Ceres CDNA ID no. 25446196
  misc_feature (39)..(179): Pfam Name: Hin1 PFAM Desc: Harpin
  misc_feature: Homolog of GI Number: 62701864 NR Desc: Harpin
  misc_feature: Homolog of GI Number: 77553726 NR Desc: Harpin
  misc_feature: Homolog of GI Number: 50924139 NR Desc: OJ991214_12.17
  misc_feature: Homolog of GI Number: 50251988 NR Desc: harpin
  misc_feature: Homolog of GI Number: 50929785 NR Desc: OSJNBa0088H09.16
  misc_feature: Homolog of GI Number: 28392929 NR Desc: putative VAMP protein SEC22
  misc_feature: Homolog of GI Number: 13374879 NR Desc: NDR1/HIN1
  misc_feature: Homolog of GI Number: 21554028 NR Desc: putative harpin
  misc_feature: Homolog of GI Number: 38603936 NR Desc: At5g06330
  misc_feature: Homolog of GI Number: 30017263 NR Desc: At4g01410
  misc_feature: Useful for delaying flowering time
  misc_feature: Useful for increasing chlorophyll and photosynthetic capacity
  misc_feature: Useful for making bigger plants
  misc_feature: Useful for making ornamental plants with modified leaves
  misc_feature: Useful for making plants with increased biomass and foliage
  misc_feature: Useful for making smaller plants
  misc_feature: Useful for sterility
MGKDCGNHGDDDFRQSCRRLLAILLTMALLVGVVALIVYLVLRPTHPRFYLQDAALRQLDLSNGSAPLLSTAAQVTVASRNPNGRVGVYYDRLDVYATYKYQQVTLASRLPTVYQGHGDVDVWSPVLAGPAVPFAPFLADALAKDLAAGYLVLQLRIDGRVRWKVGSWVSGHYHMFVTCPAYFISSGAGSGYRGAVGAHGLRFQTTTYCRVEV

SEQ ID NO: 9473 - DNA, 888 bp, Zea mays
  misc_feature: Ceres CLONE ID no. 1525396
  misc_feature: Ceres CDNA ID no. 40041447
  CDS (101)..(562): REFERENCED BY SEQ ID NO: 9474
aatcacacgacgccacaaatcgcaactcccaaccgaaacgagaacaaggacgccgtgtaaaaactcgcgcgcgccccaggaaggagaggaagagggagtaatgtaccaggccatcccgtacagcgccggccggccgtggccgcggcccgcgccggcgatgggcgtcgaggccgcggcggcggtggcggaggaggagaggctgctcgcggctgcacagcagcagcagccgtcggcgggggcggaggcggcggcgaggggggaggaggtgcgacgggcggtggcggagtgccccgtgctcgtggtggggaagcgcgggtgctgcctcagccacgtggtgaagcggctgctgcagggtctcggggtcaaccccgccgtgcacgaggtcgccgacggcgccgaggcgaagcttattgccggggtcgtcgacggcggcggcgacgttgccctcccggccgtgttcgtcgggggcaggctcctcggcggcctcgaccggctcatggccgtgcacatctccggcgacctcgtgcccatactcaaggacgccggcgcgctgtggctctgatgagaggaccaaggcgttcgtagtctcgctcccccgtccatccttccttggcctctccatcgtcgtcagctccccttgtccttgttatttttaacttgttatttttactctattaaatagaccagataggcatgcatataggacttttaactctttcggtagaaacagaatattaggtagttagaacaatggagtacgtgtgttaagcgatttacagtatatatttatcttggtttcccgtcatgtgaatatgaaagagtgctgaaattacctgaaaaaaaaaaaaaaaaaaaaaaaaaaaaaaaaaagaaaaaaaaaaaaaaaaa

SEQ ID NO: 9474 - protein, 153 aa, Zea mays
  misc_feature: Ceres CLONE ID no. 1525396
  misc_feature: Ceres CDNA ID no. 40041447
  misc_feature (64)..(145): Pfam Name: Glutaredoxin PFAM Desc: Glutaredoxin
  misc_feature: Homolog of GI Number: 56202242 NR Desc: glutaredoxin
  misc_feature: Homolog of GI Number: 34910944 NR Desc: OSJNBb0063G05.17
  misc_feature: Homolog of GI Number: 6560751 NR Desc: F3M18.8
  misc_feature: Homolog of GI Number: 50923897 NR Desc: OSJNBa0072K14.2
  misc_feature: Homolog of GI Number: 50934249 NR Desc: glutaredoxin
  misc_feature: Homolog of GI Number: 50908919 NR Desc: glutaredoxin
  misc_feature: Homolog of GI Number: 9757788 NR Desc: glutaredoxin
  misc_feature: Homolog of GI Number: 60460556 NR Desc: glutaredoxin
  misc_feature: Homolog of GI Number: 21537203 NR Desc: glutaredoxin
  misc_feature: Homolog of GI Number: 66780099 NR Desc: PE
MYQAIPYSAGRPWPRPAPAMGVEAAAAVAEEERLLAAAQQQQPSAGAEAAARGEEVRRAVAECPVLVVGKRGCCLSHVVKRLLQGLGVNPAVHEVADGAEAKLIAGVVDGGGDVALPAVFVGGRLLGGLDRLMAVHISGDLVPILKDAGALWL

SEQ ID NO: 9475 - DNA, 445 bp, Zea mays
  misc_feature: Ceres CLONE ID no. 1526130
  misc_feature: Ceres CDNA ID no. 25446258
  CDS (136)..(309): REFERENCED BY SEQ ID NO: 9476
actagaaaaaagttatgcaggctcagatctgattgctggattcggcatcttacgggcttgaatagagctaggactgggagaaaacaacaaacccgcgttggatcctgtatcggttagtccttgccttcaaggttcatgttgttttgttttggtggtcgagcatcgcatgttctgcttctggttccagatctggagaaatttctaagtcgtcgtcgtcgtcgtcgttcggttcggagcggatctgaggcgacgatggctggaggcggcgggatctcttggtctgcagtcctgcttcacctcgatggatgatgtctctgcgctgataattattggatcaatttcgataattattagtagatctatgagatatgccgcctggaagaggcgaggtaagctgcagcatgtaaaagtctgcgtgcgtcgacagcaaaaaaaaaaaaaaaaa

SEQ ID NO: 9476 - protein, 57 aa, Zea mays; identical to SEQ ID NO: 6740
  misc_feature: Ceres CLONE ID no. 1526130
  misc_feature: Ceres CDNA ID no. 25446258

SEQ ID NO: 9477 - DNA, 552 bp, Zea mays
  misc_feature: Ceres CLONE ID no. 1526347
  misc_feature: Ceres CDNA ID no. 35383446
  CDS (2)..(439): REFERENCED BY SEQ ID NO: 9478
agattccgaggcggggatgacgagcccaatggtggccaccccggtccagttccacacaaccggccgcctcagcttctgctccttttcctttcccagcgcatcagggaggcggcgattcgcggcggtgagggcgtccgcggagacgatggcgacggagaagctgggcatcaaggtggagcgcaacccgcccgagtcccgcctctccgagctcggcgtccgccagtggcccaagtgggggtgcgagaagagcaagttcccgtggacctactccgccaaggagacgtgctacctgctgcaggggaaggtgaaggtgtaccccgaaggccacggggaggagttcgtggagatcggcgcgggagaccttgtcgtcttccccaagggcatgagctgcacctgggacgtcgccgaggccgtcgacaagcactacaacttcgagtagccgccgccgccgactagccctgcggcgctcgatgtagacttgctgtgctcttgtactctgaaccaccgtgtaataaagctccggattagggtactaaaaaaaaaaaaaaaaaa

SEQ ID NO: 9478 - protein, 140 aa, Zea mays
  misc_feature: Ceres CLONE ID no. 1526347
  misc_feature: Ceres CDNA ID no. 35383446
  misc_feature: Homolog of GI Number: 50924572 NR Desc: OSJNBa0027P08.10
  misc_feature: Homolog of GI Number: 50926366 NR Desc: OSJNBb0065L13.6
MTSPMVATPVQFHTTGRLSFCSFSFPSASGRRRFAAVRASAETMATEKLGIKVERNPPESRLSELGVRQWPKWGCEKSKFPWTYSAKETCYLLQGKVKVYPEGHGEEFVEIGAGDLVVFPKGMSCTWDVAEAVDKHYNFE

SEQ ID NO: 9479 - DNA, 580 bp, Zea mays
  misc_feature: Ceres CLONE ID no. 1526595
  misc_feature: Ceres CDNA ID no. 35383447
  CDS (57)..(353): REFERENCED BY SEQ ID NO: 9480
aaccaactcgatcggtctgctagtgttggagagaagagaatacactacagtactacatggcgaagcagcagcagcagggcatggcggcagtggcgctggtagtgctggtggtgctggcggcgacggcggccgagacggcgtcggcggcttcgtgcaacgccgggcagctggcggcgtgcgcgccggcgatcactgccggcgcgacgccctccgcgtcgtgctgctccaacctcaaggcgcagcaggggtgcttctgccagttcgtgaagaaccccacctacgggcgctacatcaacagccccaacgcgcgcaaggtcgtcgcctcctgcggcgtctccgtgccgcgctgctagtactagtacgtgtgctgtgcatgcatgtacgtgcgcacgtgggctgatcttcccccttgtttcgtgtcttgccgcgcgccatcaggtgtttgtgtcacttttctgtttagtctctctacatgtgtactggcctcgtgtaccgctcctctatagtcgtgtcgtgtacgggctaattaatatatatacgacgaataaaggatgagttcggccaaaaaaaaaaaaaaaaa

SEQ ID NO: 9480 - protein, 98 aa, Zea mays; identical to SEQ ID NO: 8880
  misc_feature: Ceres CLONE ID no. 1526595
  misc_feature: Ceres CDNA ID no. 35383447
  misc_feature (33)..(98): Pfam Name: Tryp_alpha_amyl PFAM Desc: Protease inhibitor/seed storage/LTP family
  misc_feature: Homolog of GI Number: 37535858 NR Desc: putative lipid transfer protein
  misc_feature: Homolog of GI Number: 1041815 NR Desc: lipid transfer protein
  misc_feature: Homolog of GI Number: 10803445 NR Desc: lipid transfer protein
  misc_feature: Homolog of GI Number: 24158821 NR Desc: Chain A
  misc_feature: Homolog of GI Number: 3372342 NR Desc: 7 kDa lipid transfer protein
  misc_feature: Homolog of GI Number: 18893 NR Desc: aleurone specific protein
  misc_feature: Homolog of GI Number: 56713103 NR Desc: type 2 non
  misc_feature: Homolog of GI Number: 37535838 NR Desc: putative lipid transfer protein
  misc_feature: Homolog of GI Number: 37535844 NR Desc: putative lipid transfer protein
  misc_feature: Homolog of GI Number: 37535842 NR Desc: putative lipid transfer protein

SEQ ID NO: 9481 - DNA, 522 bp, Zea mays
  misc_feature: Ceres CLONE ID no. 1526710
  misc_feature: Ceres CDNA ID no. 36706891
  CDS (88)..(399): REFERENCED BY SEQ ID NO: 9482
aaagacacaccgacgcgtacgtagcacagtccattattgccgtctcccttttgcgtgagcaaagaaagagagcgagaagcagtcgccatgtctggcatcatccacaagatcgaggagaagctccacatggggggcgaccacaagaataaggaggaggagcaccacaagaaggccgaggagcaccacaagaaggaggagggggagcaccacaagaaggacggcggggagcacaaggaaggcatcgtggagaagatcaaggacaagatcaccggcgagcacggcgacaagtccggcgaccacaaggagaagaaggacaagaagaagaaggataagaagaagcacggcgagggccacgaccacgacggcggccacagtagcagcagcagcgacagcgactgagatctggtgtcgcaggtgcaacacaagtatgcttgctggatggaggattcataccagctgatgctgatgtagtgtttcactggtgtcatgcatgcatgtatcgtgctattataatcaaaaaaa

SEQ ID NO: 9482 - protein, 103 aa, Zea mays; identical to SEQ ID NO: 8882
  misc_feature: Ceres CLONE ID no. 1526710
  misc_feature: Ceres CDNA ID no. 36706891
  misc_feature (2)..(103): Pfam Name: Dehydrin PFAM Desc: Dehydrin
  misc_feature: Homolog of GI Number: 50582768 NR Desc: putative dehydrin
  misc_feature: Homolog of GI Number: 2913893 NR Desc: LIP5
  misc_feature: Homolog of GI Number: 50812722 NR Desc: dehydrin 13
  misc_feature: Homolog of GI Number: 2331141 NR Desc: water
  misc_feature: Homolog of GI Number: 60459395 NR Desc: cold
  misc_feature: Homolog of GI Number: 18478480 NR Desc: maturation
  misc_feature: Homolog of GI Number: 7446584 NR Desc: cold stress protein SRC1
  misc_feature: Homolog of GI Number: 1657853 NR Desc: cold acclimation protein WCOR825
  misc_feature: Homolog of GI Number: 45790792 NR Desc: water stress induced protein
  misc_feature: Homolog of GI Number: 23506601 NR Desc: dehydrin

SEQ ID NO: 9483 - DNA, 587 bp, Zea mays
  misc_feature: Ceres CLONE ID no. 1526713
  misc_feature: Ceres CDNA ID no. 40041448
  CDS (100)..(396): REFERENCED BY SEQ ID NO: 9484
aaagagaaggagattgctctgtatggtagagtactgacatcggataaaaatgatggtgctggattagaaaacgaagatatcggcgatgatggtgaggatatggaaaatgacaaacctttgtctgaaatcaaaacctacgaagatgatgggaccagaactgtagtcaccaccagtgaaattactcctgaagaagatgacattgtcccgaaaactgtcggccccgtggcgacgagcctcaccagcaagaatcctagctcttttgccaagaagaacagcagtttaggtgtgaagaggaagccaccgaagagaacgttcaagagcaaggctagagcgaaaaggggtgacaagaagcggggtgctgcaaagggtaaaaggaagggcaagggaatgaagtagtgttttgtgaaccctctgtaggaagaattatgctgtcactggctgtggacctgtggttaatctcgcatcacctgatctgcagtttgtttggtaatatattgatgatcatttgttccgcaaacaaattgttagggaacaaatttgtgatatcgatgctcagttgttgggttgtgcaaaaaaaaaaaaaaaaa

SEQ ID NO: 9484 - protein, 98 aa, Zea mays
  misc_feature: Ceres CLONE ID no. 1526713
  misc_feature: Ceres CDNA ID no. 40041448
MENDKPLSEIKTYEDDGTRTVVTTSEITPEEDDIVPKTVGPVATSLTSKNPSSFAKKNSSLGVKRKPPKRTFKSKARAKRGDKKRGAAKGKRKGKGMK

SEQ ID NO: 9485 - DNA, 618 bp, Zea mays
  misc_feature: Ceres CLONE ID no. 1526913
  misc_feature: Ceres CDNA ID no. 36707306
  CDS (72)..(410): REFERENCED BY SEQ ID NO: 9486
agaaaaccctagcagttcggtagtccctctcctctcgaggtattagcagtcgaccggttcctcggagcacgatgaagtttgttgctgcctacctgcttgctgtcctcgctgggaacgccagcccctccgctgacgatttgactgccattctggagtcagttggctgtgaagttgacaatgaaaagatggaactcctgctgtcccaactgagcggtaaggacatcaccgagctcattgccgcgggcagggagaagtttgcttcagtcccatgtggtggcggcggtgtcgctgttgcggcagctgcacctgctgctggcggagctgctcctgcagctgaggcaaagaaagaagagaaggtggaagagaaggaagaaagcgatgatgatatgggcttcagcctcttcgactaggctgcacagtcatcacagtattgttttgggcagtgaaaccagaggaaaaccagagtcatgtttagattttaagcttgttttatgttggaaagtactggaaagactgctacttgtctttatatttggtaattcagccgtagattgctatgctggttgggatttactcgtgaaccagagtttttctgtcttataaaaaaaaaaaaaaaaa

SEQ ID NO: 9486 - protein, 112 aa, Zea mays
  misc_feature: Ceres CLONE ID no. 1526913
  misc_feature: Ceres CDNA ID no. 36707306
  misc_feature (17)..(111): Pfam Name: Ribosomal_60s PFAM Desc: 60s Acidic ribosomal protein
  misc_feature: Homolog of GI Number: 790508 NR Desc: 60S acidic ribosomal protein
  misc_feature: Homolog of GI Number: 899610 NR Desc: acidic ribosomal protein P2
  misc_feature: Homolog of GI Number: 4204372 NR Desc: acidic ribosomal protein P2a
  misc_feature: Homolog of GI Number: 34906408 NR Desc: putative 60S acidic ribosomal protein P2A
  misc_feature: Homolog of GI Number: 4204374 NR Desc: acidic ribosomal protein P2a
  misc_feature: Homolog of GI Number: 55771314 NR Desc: putative acidic ribosomal protein P2a
  misc_feature: Homolog of GI Number: 32400824 NR Desc: acidic ribosomal protein P2a
  misc_feature: Homolog of GI Number: 50909175 NR Desc: putative 60S acidic ribosomal protein P2A
  misc_feature: Homolog of GI Number: 4204376 NR Desc: acidic ribosomal protein P2a
  misc_feature: Homolog of GI Number: 52353712 NR Desc: putative 60S acidic ribosomal protein
MKFVAAYLLAVLAGNASPSADDLTAILESVGCEVDNEKMELLLSQLSGKDITELIAAGREKFASVPCGGGGVAVAAAAPAAGGAAPAAEAKKEEKVEEKEESDDDMGFSLFD

SEQ ID NO: 9487 - DNA, 841 bp, Zea mays
  misc_feature: Ceres CLONE ID no. 1527290
  misc_feature: Ceres CDNA ID no. 36588223
  CDS (124)..(534): REFERENCED BY SEQ ID NO: 9488
aatcaatagccagttctaatctcaggttgggggaaataggcctcgcgggtcgcaaaccgctctctgctgatttgggatttgggaggcgctcgagttttcaggtaaaccatagtttagtgacccatggctcgtactaagcaaactgctcgcaagtccactggagggaaggctcctaggaagcaacttgccaccaaggctgcccgtaagtctgcacccacaactgggggagtaaagaagcctcatcgttaccgccctggaactgttgctcttcgtgaaatccgcaagtatcagaagagcactgacctgctcataaggaagcttccgttccaaaggcttgtcagggagattgcccaggatttcaagactgatcttcgtttccagagccatgcggtgcttgcgctgcaggaggctgcggaggcgtacctggtgggtctattcgaggacactaatctgtgcgccattcatgccaagcgcgtcaccatcatgcccaaggacattcagctggctaggaggatccgtggtgaaagggcctagattctctatttactgctactgggagtggctccgtagtgtatggtttgcatctgttcgatgcttgcttttgtgaaagtttacgtttgtgggtgttcgaatttgtaatattcatccgtagtggacaagtggtaggaagtgccgcaatctgactatgttttcaaatttataattgctgtcgattagtgttggtgctggttttgctcatcaacggattaactaaccttattggttatctgaacgacgaatttgatatgttaactcgggatcttcgttaaaaaaaaaaaaaaaaaaaaaaaaaaaaaaaaaa

SEQ ID NO: 9488 - protein, 136 aa, Zea mays; identical to SEQ ID NO: 60
  misc_feature: Ceres CLONE ID no. 1527290
  misc_feature: Ceres CDNA ID no. 36588223
  misc_feature (58)..(134): Pfam Name: Histone PFAM Desc: Core histone H2A/H2B/H3/H4
  misc_feature: Homolog of GI Number: 37991915 NR Desc: histone H3.2 protein
  misc_feature: Homolog of GI Number: 18698662 NR Desc: disease
  misc_feature: Homolog of GI Number: 73808026 NR Desc: histone H3
  misc_feature: Homolog of GI Number: 62642119 NR Desc: histone 3
  misc_feature: Homolog of GI Number: 74004258 NR Desc:  similar to histone 1
  misc_feature: Homolog of GI Number: 515005 NR Desc: histone H3.2 protein
  misc_feature: Homolog of GI Number: 24585677 NR Desc: CG31613
  misc_feature: Homolog of GI Number: 68362812 NR Desc:  similar to CG31613
  misc_feature: Homolog of GI Number: 68441481 NR Desc:  similar to CG31613
  misc_feature: Homolog of GI Number: 50728592 NR Desc:  similar to histone protein Hist2h3c1

SEQ ID NO: 9489 - DNA, 761 bp, Zea mays
  misc_feature: Ceres CLONE ID no. 1527467
  misc_feature: Ceres CDNA ID no. 25446197
  CDS (146)..(586): REFERENCED BY SEQ ID NO: 9490
atggggcggcacatctgttaacccgccccaagggtacacggtcgccgccacctgccctaggccgcaggagggagcgttcgccgccccgccctccgtctcccgtcgcctcgcccccgcgctccgtctgccgcccctctccggagaaatgtctgaccatctctttgaggacaccttcgtcgtcactagactcgaccctgatggcaaaaagtttgatagagtttctcgtgttgaagctcgcagcgagcagttagatatgtatatgcagcttgatgttgccacagatgtttatcctatgcatgctggcgagaaatttaacatggttatcgcgcctactctgaatttggatggcaccccagatactggctactatactcaggctggtagaaaaactctggcagacaattatgagtacgtcatgcaagggaagctttacaaaatctcagaagacacatcatccagccaaaacgctaaagtggagatgtatgcatcgttcggcgggcttcttatgctgctcaggggtgacccttccactgccgctagctttgagcttgatcagaggctctttctgctcatccgcaaggtgtaaaactgtggttgctcttaggtgtttgccttgctcgtcacttatttaatttccatccgtgggtgaagcttgttatatactgttgtaagtactgttttctatatcgccatggatttatggtaacgagttcatgtttctcttgctaaaaagattgttatccctaaaaaaaaaaaaaaaa

SEQ ID NO: 9490 - protein, 146 aa, Zea mays
  misc_feature: Ceres CLONE ID no. 1527467
  misc_feature: Ceres CDNA ID no. 25446197
  misc_feature (7)..(145): Pfam Name: RNA_pol_Rpb8 PFAM Desc: RNA polymerase Rpb8
  misc_feature: Homolog of GI Number: 53793231 NR Desc: putative RNA polymerase I
  misc_feature: Homolog of GI Number: 50920087 NR Desc: putative  RNA polymerase
  misc_feature: Homolog of GI Number: 4585968 NR Desc: RNA polymerase I
  misc_feature: Homolog of GI Number: 13094965 NR Desc: RNA polymerase I
  misc_feature: Homolog of GI Number: 60470212 NR Desc: RNA polymerase II core subunit
  misc_feature: Homolog of GI Number: 62657461 NR Desc:  similar to polymerase
  misc_feature: Homolog of GI Number: 21358365 NR Desc: CG11246
  misc_feature: Homolog of GI Number: 55621620 NR Desc:  similar to polymerase
  misc_feature: Homolog of GI Number: 14193247 NR Desc: RNA polymerase subunit
MSDHLFEDTFVVTRLDPDGKKFDRVSRVEARSEQLDMYMQLDVATDVYPMHAGEKFNMVIAPTLNLDGTPDTGYYTQAGRKTLADNYEYVMQGKLYKISEDTSSSQNAKVEMYASFGGLLMLLRGDPSTAASFELDQRLFLLIRKV

SEQ ID NO: 9491 - DNA, 582 bp, Zea mays
  misc_feature: Ceres CLONE ID no. 1527472
  misc_feature: Ceres CDNA ID no. 40352022
  CDS (109)..(342): REFERENCED BY SEQ ID NO: 9492
aagcagcgctacttgtgctcccccaacgctactaccgccgctagctggttcaagtgcggcgagcggagccggagaccggtagaggaaattaagaggcgtcgatcgggcatggggtgcgacgacaagtgcgggtgcgccgtgccgtgccccggcggcaaagactgcaggtgcacgtcggggagcggcgggcagcgggagcacacgacttgcggctgcggggagcactgcgagtgcagcccgtgcacgtgtggccgggccacgatgccgtccggccgcgagaacaggagggctaactgctcctgcggggcgtcctgcaactgcgcatcctgcgcctcggcctgatccgtgcgcctcgccctcgtgctaccgcgctgcctagtggagggagttgtctactgtccagtgaggatctggacgaagcaactagcgctacttctagtagagtacgcgcatgaggataataaaggggcttgtgtcatgctcgccagacgcatcacgcgctgcatctgcatcgtggtatcgtgtagtaagtttgtgtatgaataaacactaccactttatgtccaaaaaaaaaaaaaaaaa

SEQ ID NO: 9492 - protein, 77 aa, Zea mays; identical to SEQ ID NO: 6882
  misc_feature: Ceres CLONE ID no. 1527472
  misc_feature: Ceres CDNA ID no. 40352022
  misc_feature (2)..(76): Pfam Name: Metallothio_PEC PFAM Desc: Plant PEC family metallothionein

SEQ ID NO: 9493 - DNA, 531 bp, Zea mays
  misc_feature: Ceres CLONE ID no. 1527557
  misc_feature: Ceres CDNA ID no. 40041449
  CDS (42)..(470): REFERENCED BY SEQ ID NO: 9494
accagttcgttctccaatacacgtttcagcagcatatagaaatgagctctcctttcagacgttttgttcaaatcggcagagttgccttgatcaactacggccctgatgttggcaaactttgcgtcatcatcgacgttgtcgattcaaacagagccctcattgacggtcccgagtccgtcactggtgttaagcgtcaagctattcacttcaagcgtttgagccttactgatcacgtcgtcaaggttccccgtaacgccagacaaaccttgttgaccaaggctgtcactaccgctgacgttaagaccaagtttgccaacagcgcttggggcaagaaattggccgctaaacaagccagagctaacacttctgacttcgatcgcttcaagatcaccgtcctcaagaagagaagaaaccacctcgttgctgctgaaacccgcaagttagtcaaggctgccaacaagaagaaataaataatatttcgtgtgtaaacaacttgcaaataaaatatcaaaacaaaaaaaaaaaaaaaaa

SEQ ID NO: 9494 - protein, 142 aa, Zea mays
  misc_feature: Ceres CLONE ID no. 1527557
  misc_feature: Ceres CDNA ID no. 40041449
  misc_feature (50)..(126): Pfam Name: Ribosomal_L14e PFAM Desc: Ribosomal protein L14
  misc_feature (9)..(41): Pfam Name: KOW PFAM Desc: KOW motif
  misc_feature: Homolog of GI Number: 46329783 NR Desc: MGC83076 protein
  misc_feature: Homolog of GI Number: 50838812 NR Desc: ribosomal protein L14
  misc_feature: Homolog of GI Number: 13559250 NR Desc: putative ribosomal protein L14
  misc_feature: Homolog of GI Number: 12621122 NR Desc: ribosomal protein L14
  misc_feature: Homolog of GI Number: 62858051 NR Desc: LOC549288
  misc_feature: Homolog of GI Number: 57113391 NR Desc:  similar to ribosomal protein L14
  misc_feature: Homolog of GI Number: 73952054 NR Desc:  similar to ribosomal protein L14 isoform 3
  misc_feature: Homolog of GI Number: 20555164 NR Desc:  similar to ribosomal protein L14
  misc_feature: Homolog of GI Number: 62201695 NR Desc: Rpl14 protein
MSSPFRRFVQIGRVALINYGPDVGKLCVIIDVVDSNRALIDGPESVTGVKRQAIHFKRLSLTDHVVKVPRNARQTLLTKAVTTADVKTKFANSAWGKKLAAKQARANTSDFDRFKITVLKKRRNHLVAAETRKLVKAANKKK

SEQ ID NO: 9495 - DNA, 1542 bp, Zea mays
  misc_feature: Ceres CLONE ID no. 1528781
  misc_feature: Ceres CDNA ID no. 25403142
  CDS (176)..(1216): REFERENCED BY SEQ ID NO: 9496
agtcatcaccaaacgccggtggagtcactcgagcccgcccgggtctcttcctcttccattgattccattcaagatcactactgttaccagccagccagtcgttcgttaagaagagagcgagcgagcaagagagagagagagggagaagggggaagatcagaacgaagagagggagatgagggggcaaacgcagacagcttccgcggggggccggtggcgaggcgacggcgctgcggcgtggtgttggtggtgggtggccgtggtcctcctgcttggccatttaccgagctgcgcgcgcgcggggctgctggagtccaacccgggcctggcctacaacttctacaagaacagctgccccagcgtggactccatcgtccgcagcgtcacctgggcgcaggtcgccgccaaccctgccctcccggctcgcctcctccgcctccacttccatgactgcttcgtcaagggctgcgacgcgtcgatcctgctggacaccgcgcagagcgagaagacggcggcgccgaacctgtcggtgggcgggtacgaggtgatcgacgcgatcaaggcgcagctggagagggcgtgcccgggcgtggtgtcgtgcgccgacatcgtggcgctggcggcgcgcgacgccgtgtcgtaccagttcaaggcgtcgctgtggcaggtggagacggggcggcgcgacggcacggtgtcgctggcgtccaacacgggggcgctgccgtcgcccttcgcgggcttcgcgggcctgctgcagagcttctcggaccgggggctgaacctgacggacctcgtggcgctgtcgggggcgcacaccatcggcgtggcaagctgctccagcgtcaccccgcgcctgtaccaggggaacgccagcagcgtggacccgctgctggactcggcctacgcgcggacgctcatgtcgtcgtgccccaacccgtcgccggcgtcggccaccgtggcgctggacggaggcacgccgttccggttcgacagcagttactactccagggtgcagcagaagcagggcacgctggcctccgacgccgcgctggcgcagaacgccgccgccgcgcagatggtggccgatctcaccaaccccatcaagttctacgccgccttctccatgtccatgaagaagatgggccgcgtcgacgtgctcaccggcgccaacggccagatcaggaagcagtgccgccaggtcaacacctcctgatcaacaaggcgtcacagggaggggccatggtttttccctcttcgttcttctctttttctgcaccgcctggtattattgttccatgcatccggtttcggctcggcttcggctcggcgcgcatcaaatatatttcgcccccgcgccgtgattgagggccctcctccgacgaaagaaatccattgctttctttgttatttatattagtttactcactgtcctgtgttccattgtcttgccttgcaaaaatgtaagaaagattaaagatgtaagcaaaaaaaaaacaatgcggatcatccactctaaaaaaagaaaaaaaaaaaaaaaaa

SEQ ID NO: 9496 - protein, 346 aa, Zea mays
  misc_feature: Ceres CLONE ID no. 1528781
  misc_feature: Ceres CDNA ID no. 25403142
  misc_feature (67)..(309): Pfam Name: peroxidase PFAM Desc: Peroxidase
  misc_feature: Homolog of GI Number: 575605 NR Desc: cationic peroxidase isozyme 40K precursor
  misc_feature: Homolog of GI Number: 575603 NR Desc: cationic peroxidase isozyme 38K precursor
  misc_feature: Homolog of GI Number: 55701143 NR Desc: TPA: class III peroxidase 138 precursor
  misc_feature: Homolog of GI Number: 34914862 NR Desc: putative peroxidase isozyme 38K precursor
  misc_feature: Homolog of GI Number: 3928088 NR Desc: putative peroxidase
  misc_feature: Homolog of GI Number: 51970718 NR Desc: putative peroxidase
  misc_feature: Homolog of GI Number: 37536450 NR Desc: putative peroxidase
  misc_feature: Homolog of GI Number: 34902232 NR Desc: Putative peroxidase
  misc_feature: Homolog of GI Number: 1084405 NR Desc: peroxidase
  misc_feature: Homolog of GI Number: 55700945 NR Desc: TPA: class III peroxidase 39 precursor
  misc_feature: Useful for delaying flowering time
  misc_feature: Useful for making ornamental plants with modified flowers
  misc_feature: Useful for making taller plants
MRGQTQTASAGGRWRGDGAAAWCWWWVAVVLLLGHLPSCARAGLLESNPGLAYNFYKNSCPSVDSIVRSVTWAQVAANPALPARLLRLHFHDCFVKGCDASILLDTAQSEKTAAPNLSVGGYEVIDAIKAQLERACPGVVSCADIVALAARDAVSYQFKASLWQVETGRRDGTVSLASNTGALPSPFAGFAGLLQSFSDRGLNLTDLVALSGAHTIGVASCSSVTPRLYQGNASSVDPLLDSAYARTLMSSCPNPSPASATVALDGGTPFRFDSSYYSRVQQKQGTLASDAALAQNAAAAQMVADLTNPIKFYAAFSMSMKKMGRVDVLTGANGQIRKQCRQVNTS

SEQ ID NO: 9497 - DNA, 882 bp, Zea mays
  misc_feature: Ceres CLONE ID no. 1528877
  misc_feature: Ceres CDNA ID no. 25446198
  CDS (134)..(676): REFERENCED BY SEQ ID NO: 9498
aacaccaccaccacccaatcactcccgtctcgctctgcaccactcaaacctcttcttcctttccggaaaccacaccagcagtccccgcaggctgcagcttccccggccgccgcgcccaagccaaagctggaggatggccgcagtcgcagcgatgaaggctctcgcggtcgccgcctcgccggtgtcggcacggcagccccgtcggtacgtcgcaggtggcgctagccggcggctgcagtcgccgttccacggcgtgtcggtgcagtgccctgggcgaccgcggcgggcgacgccccggcgggggccgcaggtggcggtggtggtggcggcggcggtccggccggcgatccagttcatccagggcacggacgagcagacgatcccggacgtgcggctgaccaagtcccgggacggcacgaacggcgtggccatcttcacgttcgagcagccgtcggtgttcgactcgtcggcggagctcggggacatcacgggcttctacatgatcgacgacgagggcgtgctgcagtccgtggacgtgagcgccaagttcgtcaacggcaagccggcgcggatcgaggccaagtacgtcatgcgcacgccccgggactgggaccgcttcatgcgcttcatggagcggtactctcaggccaacggcctccagttcgtcaagaactgacgagccggctttgagatcgattgcctgcctgctgcgctacgttctgcttgcttgctagtgttcttttttttttctttcctttctcccctgtgctgcgcccctggtgttgtgattgtgacctgctgtgtgcttgtgagtgatttttttttttgtagagaaaagaaagaaatatgggaggtttgttttgctcgaaaaaaaaaaaaaaa

SEQ ID NO: 9498 - protein, 180 aa, Zea mays
  misc_feature: Ceres CLONE ID no. 1528877
  misc_feature: Ceres CDNA ID no. 25446198
  misc_feature (69)..(180): Pfam Name: PsbW PFAM Desc: Photosystem II reaction centre W protein
  misc_feature: Homolog of GI Number: 57899200 NR Desc: putative photosystem II protein reaction center W
  misc_feature: Homolog of GI Number: 34907246 NR Desc: photosystem II protein W
  misc_feature: Homolog of GI Number: 21592461 NR Desc: photosystem II protein W
  misc_feature: Homolog of GI Number: 7269721 NR Desc: photosystem II protein W
  misc_feature: Homolog of GI Number: 19880501 NR Desc: saline responsive OSSRII protein
  misc_feature: Homolog of GI Number: 1185169 NR Desc: PSII
  misc_feature: Homolog of GI Number: 1276813 NR Desc: Photosystem II protein W
  misc_feature: Homolog of GI Number: 3602942 NR Desc: PSII protein W
  misc_feature: Homolog of GI Number: 45513158 NR Desc: COG1187: 16S rRNA uridine
  misc_feature: Homolog of GI Number: 1346874 NR Desc: Photosystem II reaction center W protein
MAAVAAMKALAVAASPVSARQPRRYVAGGASRRLQSPFHGVSVQCPGRPRRATPRRGPQVAVVVAAAVRPAIQFIQGTDEQTIPDVRLTKSRDGTNGVAIFTFEQPSVFDSSAELGDITGFYMIDDEGVLQSVDVSAKFVNGKPARIEAKYVMRTPRDWDRFMRFMERYSQANGLQFVKN

SEQ ID NO: 9499 - DNA, 1031 bp, Zea mays
  misc_feature: Ceres CLONE ID no. 1528961
  misc_feature: Ceres CDNA ID no. 25447076
  CDS (99)..(776): REFERENCED BY SEQ ID NO: 9500
aaaattacttaccgtaccagggttcaatcggcaaggaagaattgttgtgttcacaaaaaggacgacgcagcgtagcagcagagagccagagaccagagatggccgccctcgccgccgcctccacggccgccttcgccgcgaagccgcgcgcgcgcctctccgtggcctgctccgccgccaccggcgacagcagcagcgtgtcgctcgcgtcctccgtgaagacgttctccgccgcgctggcgctgtcgtcggtgctgctgtcctcggccgccacctcccctccgcccgcggccgccgacatcgcggggctgaccccgtgcaaggagtccaaggcgttcgcgaagcgcgagaagaactcgatcaagaagctcaccgcgtcgctgaagaagtacgcgcccgacagcgcccccgcgctcgccatcaacgccaccatcgagaagaccaagcgccggttcgagaactacggcaagttcgggctgctgtgcggcgccgacggcctgccgcacctcatcgtcagcggcgaccagcggcactggggcgagttcgtcaccccgggcctgctcttcctctacatcgccggctggatcgggtgggtcggcaggagctacctcatcgccatcagcggcgagaagaagcccgccatgagggagatcatcatcgacgtcgagctcgccacccgcctcctccccagggggttcatctggcccgtcgccgcctaccgcgagctcatcaacggggacctcgtcgtcgacgacaaggacatcggctactactagctgcgcttgttcacctgcttgcactgtgcatatatattgctgctgccgagctgggcgcttggatagtacgtggggaaacatggatggcttttggtgtaggagctgcatgctttgctagggctatctggtcatgtaggaaatggaagctctgctgtactttaagaaacttgatgaaacctttgtataactcaactgtacctctatctatcccttgtgtgtatttgagaacgatttcagagcaaaaaaaaaaaaaaa

SEQ ID NO: 9500 - protein, 225 aa, Zea mays
  misc_feature: Ceres CLONE ID no. 1528961
  misc_feature: Ceres CDNA ID no. 25447076
  misc_feature (42)..(220): Pfam Name: PSI_PsaF PFAM Desc: Photosystem I reaction centre subunit III
  misc_feature: Homolog of GI Number: 1076728 NR Desc: photosystem
  misc_feature: Homolog of GI Number: 34897038 NR Desc: photosystem
  misc_feature: Homolog of GI Number: 3885892 NR Desc: photosystem
  misc_feature: Homolog of GI Number: 21593588 NR Desc: photosystem I subunit III precursor
  misc_feature: Homolog of GI Number: 23397082 NR Desc: putative photosystem I reaction centre subunit III precursor
  misc_feature: Homolog of GI Number: 15450361 NR Desc: At1g31330/T19E23_1
  misc_feature: Homolog of GI Number: 8954295 NR Desc: photosystem I reaction center subunit III
  misc_feature: Homolog of GI Number: 1172664 NR Desc: Photosystem I reaction centre subunit III
  misc_feature: Homolog of GI Number: 30013659 NR Desc: putative photosystem I subunit III precursor
  misc_feature: Homolog of GI Number: 21303 NR Desc: PSI subunit IV preprotein
MAALAAASTAAFAAKPRARLSVACSAATGDSSSVSLASSVKTFSAALALSSVLLSSAATSPPPAAADIAGLTPCKESKAFAKREKNSIKKLTASLKKYAPDSAPALAINATIEKTKRRFENYGKFGLLCGADGLPHLIVSGDQRHWGEFVTPGLLFLYIAGWIGWVGRSYLIAISGEKKPAMREIIIDVELATRLLPRGFIWPVAAYRELINGDLVVDDKDIGYY

SEQ ID NO: 9501 - DNA, 1132 bp, Zea mays
  misc_feature: Ceres CLONE ID no. 1528962
  misc_feature: Ceres CDNA ID no. 36707270
  CDS (107)..(877): REFERENCED BY SEQ ID NO: 9502
aaaaaaaaaaaaaaaaaaaaaaacccaggcccaccgctagcatccgcagttcccccgcgcccgagacgcaaccccgcgccaggagtaagtttgttcttttatcgatatggcgagggaggagaatgtctacatggccaagctggctgagcaggccgaaaggtatgaagagatggttgagtatatggagaaggtggctaagactgtagatgtggaagagctcactgttgaggagcgtaacctcttgtcggtcgcatacaagaatgtgattggggctcgccgtgcttcatggcgcattgtctcttctattgaacagaaggaggagtcccgtaagaacgaagagcatgtgaaccttatcaaggaataccgtgcgaagatcgaggctgaactgagcaatatctgtgatggcatcctgaagctgcttgactcccacctagtgccttcttctactgctgctgaatcaaaggtcttctacctcaagatgaagggtgactatcacaggtatcttgcggaatttaagactggtcctgagaggaaggaatctgctgagagcacgatgatggcctacaaggctgctcaggacattgcgctggctgagctggcacctacccatccgataaggcttgggcttgctcttaacttctcagtgttctattatgagattctgaactccccagacaaagcttgcaaccttgcaaagcaggcgtttgatgaagctatctcccagttagacacccttggggaggagtcatacaaagatagcactctgatcatgcagctccttagggacaacttgaccctttggacctctgacctcacggaggatggtgctgatgagggcaaagaagccccgaaaggtgaggctggtgacggacagtaatcttgggagagcgcatattgttcgagcccattgttttagatgctctatgctgtcgaagctgaagctgtgccgtgctattattgtagctgatttcctgttccctcacttctttttttatattagtaggctggtagtgttcgaattagttccccattgctttgtgttgccgctagttggcattaagtccgtgtggactggtattattcactggatttgagaagcatgtcagtggttgctcaaaaaaaaaaaaaaaaa

SEQ ID NO: 9502 - protein, 256 aa, Zea mays
  misc_feature: Ceres CLONE ID no. 1528962
  misc_feature: Ceres CDNA ID no. 36707270
  misc_feature: Useful for making plants with modulated growth and phenotype characteristics
  misc_feature: null
  misc_feature: The sequence is a functional homolog of  SEQ ID NO 2350 in the  10/374,780 US patent application
  misc_feature: The sequence is a functional homolog of  SEQ ID NO 342 in the  10/412,699 US patent application
  misc_feature: The sequence is a functional homolog of  SEQ ID NO 344 in the  10/412,699 US patent application
  misc_feature: The sequence is a functional homolog of  SEQ ID NO 782 in the  11/479,226 US patent application
  misc_feature: The sequence is a functional homolog of  SEQ ID NO 786 in the  11/479,226 US patent application
  misc_feature: The sequence is a functional homolog of  SEQ ID NO 789 in the  11/479,226 US patent application
  misc_feature: The sequence is a functional homolog of  SEQ ID NO 790 in the  10/225,066 US patent application
  misc_feature: The sequence is a functional homolog of  SEQ ID NO 797 in the  11/479,226 US patent application
  misc_feature: The sequence is a functional homolog of  SEQ ID NO 801 in the  11/479,226 US patent application
  misc_feature: The sequence is a functional homolog of  SEQ ID NO 805 in the  11/479,226 US patent application
  misc_feature: Useful for making plants with modulated drought sensitivity
  misc_feature (3)..(240): Pfam Name: 14 PFAM Desc: 14
  misc_feature: Homolog of GI Number: 46946654 NR Desc: 14
  misc_feature: Homolog of GI Number: 37903393 NR Desc: 14
  misc_feature: Homolog of GI Number: 51964902 NR Desc: PREDICTED OJ1124_B05.7 gene product
  misc_feature: Homolog of GI Number: 53794211 NR Desc: putative 14
  misc_feature: Homolog of GI Number: 7271253 NR Desc: 14
  misc_feature: Homolog of GI Number: 2921512 NR Desc: GF14 protein
  misc_feature: Homolog of GI Number: 55375985 NR Desc: 14
  misc_feature: Homolog of GI Number: 44917163 NR Desc: 14
  misc_feature: Homolog of GI Number: 44917165 NR Desc: 14
  misc_feature: Homolog of GI Number: 1070354 NR Desc: Hv14
MAREENVYMAKLAEQAERYEEMVEYMEKVAKTVDVEELTVEERNLLSVAYKNVIGARRASWRIVSSIEQKEESRKNEEHVNLIKEYRAKIEAELSNICDGILKLLDSHLVPSSTAAESKVFYLKMKGDYHRYLAEFKTGPERKESAESTMMAYKAAQDIALAELAPTHPIRLGLALNFSVFYYEILNSPDKACNLAKQAFDEAISQLDTLGEESYKDSTLIMQLLRDNLTLWTSDLTEDGADEGKEAPKGEAGDGQ

SEQ ID NO: 9503 - DNA, 1113 bp, Zea mays
  misc_feature: Ceres CLONE ID no. 1529159
  misc_feature: Ceres CDNA ID no. 36707127
  CDS (198)..(863): REFERENCED BY SEQ ID NO: 9504
atgtgagagctcgtactgtgtctgtgtgactgtctctgtggccgtatgagcatttagccctggatctgtgtttgttaaaaaaaaaaaaaaaaaaaaaaaaaaaaaactccgtttcgaattctagggttttgctgctctccgaccccgagctccgaaggccgcagcatcaggcgcggcccccctcgcgtgtgaccgagatggcgctgccgaatcaggggaccgttgattaccccagcttcaagctcgtcatcgtcggcgatggtggaactggtaaaactacatttgtgaagaggcatctcactggagagtttgagaagaaatatgaaccaaccattggtgtggaagttcatccgttggatttcaccactaactgtggtaagatcaggttctactgctgggataccgcagggcaagagaagtttggtggcctcagggatggatactatatccatggccagtgtgcgatcatcatgtttgatgtaacttcaaggcttacttacaagaatgttcctacgtggcatagggacctgtgcagggtctgtgaaaacatccccattgtcctctgcggtaataaggttgatgtgaagaacaggcaggtcaaagccaagcaggttactttccacaggaagaagaatctgcagtactatgaaatttctgccaagagcaactacaactttgagaaacctttcctgtaccttgcaaggaagctggctggtgatccgaaccttcactttgttgaagctgttgctcttaagcctccggaagttaccatcgacatggctatgcagcagcagcatgaagctgagcttgctgcagcagctgcacaacctcttcctgatgacgatgatgatctgattgagtagaaaggatcatgagtcttgaacttgagcaggagttgtgccttgcgtgttttaagttgttctagggtgaactcttgagttctcattgtctggatcatctttttctccttggatgtgttgcatcttttgagtgtggaaatggatggtactcctcgccatgaatttgctggctactttatacattgctttgtaactctgtttgatgataaactttgttgtggcaatcctcttagtgcaaaaaaaaaaaaaaaaa

SEQ ID NO: 9504 - protein, 221 aa, Zea mays
  misc_feature: Ceres CLONE ID no. 1529159
  misc_feature: Ceres CDNA ID no. 36707127
  misc_feature (15)..(173): Pfam Name: Ras PFAM Desc: Ras family
  misc_feature: Homolog of GI Number: 50932773 NR Desc: GTP
  misc_feature: Homolog of GI Number: 19919694 NR Desc: small Ran
  misc_feature: Homolog of GI Number: 34912576 NR Desc: putative GTP
  misc_feature: Homolog of GI Number: 20149262 NR Desc: GTP
  misc_feature: Homolog of GI Number: 21435991 NR Desc: AT5g55190/MCO15_14
  misc_feature: Homolog of GI Number: 23397164 NR Desc: putative small Ras GTP
  misc_feature: Homolog of GI Number: 10334503 NR Desc: GTP
  misc_feature: Homolog of GI Number: 1172835 NR Desc: GTP
  misc_feature: Homolog of GI Number: 23397041 NR Desc: putative RAN2 small Ras GTP
  misc_feature: Homolog of GI Number: 21618037 NR Desc: RAN1 small Ras
MALPNQGTVDYPSFKLVIVGDGGTGKTTFVKRHLTGEFEKKYEPTIGVEVHPLDFTTNCGKIRFYCWDTAGQEKFGGLRDGYYIHGQCAIIMFDVTSRLTYKNVPTWHRDLCRVCENIPIVLCGNKVDVKNRQVKAKQVTFHRKKNLQYYEISAKSNYNFEKPFLYLARKLAGDPNLHFVEAVALKPPEVTIDMAMQQQHEAELAAAAAQPLPDDDDDLIE

SEQ ID NO: 9505 - DNA, 431 bp, Zea mays
  misc_feature: Ceres CLONE ID no. 1529338
  misc_feature: Ceres CDNA ID no. 36706981
  CDS (2)..(310): REFERENCED BY SEQ ID NO: 9506
aagcagcagcagcagccgccgacgccgacgtaaaagcccgagtcgctcgtctcttcccagatcctccgagcacaacagctctccgtcgccgtcgccatgggtaaggttcacggatcgcttgcccgcgcggggaaggtgcgtgggcagacgcccaaggtggcgaagcaggacaagaagaagaagccccgcggccgcgcgtacaagcgcatgcagtacaaccgccgcttcgtcaccgccgtcgtcggattcggcaagaaacgcggccccaactcctcggagaagtagatatagccatgtctttgtgttttgatcccccactagtttccttgtactgatggcaagttgctgaagacttatatgctattattatctgtatcgatgtgttactgcaacactatgaaatatggtatgcatcgttgagccaaaaaaaa

SEQ ID NO: 9506 - protein, 62 aa, Zea mays; identical to SEQ ID NO: 974
  misc_feature: Ceres CLONE ID no. 1529338
  misc_feature: Ceres CDNA ID no. 36706981
  misc_feature (3)..(61): Pfam Name: Ribosomal_S30 PFAM Desc: Ribosomal protein S30
  misc_feature: Homolog of GI Number: 55773694 NR Desc: 40S ribosomal protein S30
  misc_feature: Homolog of GI Number: 30102786 NR Desc: At5g56670
  misc_feature: Homolog of GI Number: 25295582 NR Desc: 40S ribosomal protein S30
  misc_feature: Homolog of GI Number: 58760461 NR Desc: ubiquitin
  misc_feature: Homolog of GI Number: 47682823 NR Desc: MGC80045 protein
  misc_feature: Homolog of GI Number: 6679753 NR Desc: Finkel
  misc_feature: Homolog of GI Number: 15822932 NR Desc: Finkel
  misc_feature: Homolog of GI Number: 36968262 NR Desc: Finkel
  misc_feature: Homolog of GI Number: 60678256 NR Desc: Finkel
  misc_feature: Homolog of GI Number: 63694872 NR Desc:  similar to Finkel

SEQ ID NO: 9507 - DNA, 919 bp, Zea mays
  misc_feature: Ceres CLONE ID no. 1529424
  misc_feature: Ceres CDNA ID no. 36592474
  CDS (122)..(625): REFERENCED BY SEQ ID NO: 9508
aaccctactccatcttctcgtgttgttcggcgcacgcggagacagcccgcgatcccgatcccgatccttcttcacgcgaatctcgacgatcccccccttccttccttcaagatgccattttatgcggcacgacaagacgatgctcatcggtgctgaccccacgcacgtcggcgaccgctgcatcagggtcacaatccaccactgcttctttgacggcacgcggcagaggcacccccgcctccgcttcggaaaggttcacctctacaacaactacacgcgcagctggggcatctacgccgtctgcgcaggcgtagaggcccagatcgtgtcccagtgcaacatctacgaggcaggtggagggcccccaaagaagacaactgtattcaagtacatgccggagaaggccggcgaccgagaggacgtggtggcagggtcgatcagctcggaaggggacgccttcctcaatggcgcgctgccctgcctgatcgataaccctgggtctgtcttcaggccagaggagtactaccagcagtggaccatggagccagcgtcgccggcgctcaaggacataatacagctctgcgcaggatggcagccggtgccccgccccccgtatgatcgctgactttcatcattctgatatgctgcagctcgcttctgtaagaatattcgtttcacggaagcactgcatttgtatgcatctcatcctaggtaattcaacatttgtttcatggtagagcggcatttgtatgccactcctcttcatctgccccctctctgaaatgtagtagaaaagttgttatggttttctatttgtgtctttatttatggtacatacaattcccaatgtaaagatatttctctcgtccatagcagtacaatagcttttagttgtgaatgctgaaaaaaaaaaaaaaaa

SEQ ID NO: 9508 - protein, 167 aa, Zea mays
  misc_feature: Ceres CLONE ID no. 1529424
  misc_feature: Ceres CDNA ID no. 36592474
  misc_feature (3)..(75): Pfam Name: Pec_lyase_C PFAM Desc: Pectate lyase
  misc_feature: Homolog of GI Number: 34913784 NR Desc: pectate lyase
  misc_feature: Homolog of GI Number: 30694193 NR Desc: pectate lyase family protein
  misc_feature: Homolog of GI Number: 42572687 NR Desc: pectate lyase family protein
  misc_feature: Homolog of GI Number: 7019647 NR Desc: pectate lyase
  misc_feature: Homolog of GI Number: 6682233 NR Desc: putative pectate lyase
  misc_feature: Homolog of GI Number: 34908076 NR Desc: P0506B12.27
  misc_feature: Homolog of GI Number: 56201953 NR Desc: putative pectate lyase
  misc_feature: Homolog of GI Number: 2196707 NR Desc: pectate lyase
  misc_feature: Homolog of GI Number: 50943521 NR Desc: putative Cup s 1 pollen allergen
  misc_feature: Homolog of GI Number: 9758606 NR Desc: pectate lyase
MRHDKTMLIGADPTHVGDRCIRVTIHHCFFDGTRQRHPRLRFGKVHLYNNYTRSWGIYAVCAGVEAQIVSQCNIYEAGGGPPKKTTVFKYMPEKAGDREDVVAGSISSEGDAFLNGALPCLIDNPGSVFRPEEYYQQWTMEPASPALKDIIQLCAGWQPVPRPPYDR

SEQ ID NO: 9509 - DNA, 1898 bp, Zea mays
  misc_feature: Ceres CLONE ID no. 1529487
  misc_feature: Ceres CDNA ID no. 40352023
  CDS (2)..(1630): REFERENCED BY SEQ ID NO: 9510
aatgctttctcttggtaggtgttctctgcctgcctcctccaaccccggcccctcactagaattcttgtcgcaagcacacaccatgatctgttacatgctgtggttagcggcatgctgcctcctcctcttgtacagcgttcgattcaggtccggctggagccatggcaacggccccaggagctaccccgtgattgggtgcctggtcgacttctacaagaaccggtggcggctgctggactggtacactgagctgctggcggcgtcgccgacgcagacgatcgtggtggaccggctgggcgcccggcgcaccgtggtgaccgcgaaccccgtgaacgttgagcatattctcaagagcaacttcggcaactaccccaaggggaagcccttcaccgacatcctcggcgacctgctgggcaccggcatcttcaacgtcgacggcgagctgtggtacgcgcagcggaagctggtgagccacgagttctcggcgcgcgcgctccgggagctggagttcgccgtgctcgaggacgaggcgcgggagcgccttgtgcccgccctgggcctggcggctgcgcgcggcgacgtcgtggacatgcaggacctgctccggcgcttctcgttcgacgtcatctgccgcgtgtcgctgggcgttgaccccgggtgcctggaccctgcattgccggcgccgaggctggccgcggcgttcgacgcggcggcggggatcatcgccaggcgcggcgcggcgcccgtggccgccgtgtggaaggcgaagcgcgcgctggacgtgggctcggagcggcagctgcgcgaggagatcgcggtcatccacgaggccgtcatggacctcatccacatccgcaagaaggagtgcgggctgcgggtcaacggcggcgacggacggaggagcgacctgctgtcgcggatgatcgaatgcgggtacccggacgaggcgatccgcgacatggtcatcagcttcatcatggccggccgggacaccacgtcgtcggcgctgacctggttcttctggctgctcacccgccaccgcgacgtggagcgcgaggtcctgcgggagatcacaggcggcggcgcgagccacgccgccgccggcgggcagggcaagatgcgcgcgctccacgcggcgctgtgcgagacgatgcggctgtacccgccggtggcgtgggactcgaagcacgcggcggcgggcgacgtgctgcccgacggcacccgcgtggagcgcggcgaccgcgtcacctacttccagtacgggatggggcggatggagtccatctggggcgctgatgccggcgagttcagcctgcggcgctggctgtccattattccggaggagaacgcggcgccagcgccacccgccgcggtggccggcttgtcgccgttcaagtacccggtgttccaggcggggccgcggacgtgcctcggcaaggagatggccttcgtgcagatgaagttcgtggccagcaccgtgctccggcggttcgagctcgtccccgtggacgaggggcgtgtgccggtgttcctgcccctgatgacggcacacatgggggacgggctcaacgtgacggtgaggagcagatcaggggaacacgttgcctctgctgcgtcgtctgggaattgagtattatacccggcctcctcatgtaagtagtacgacaaattaaaaccaggattatttatttagttactactactatatgaaaactgcttcgttattactactagctatgaaattcatgaggaccacgtactgttttattagctgcgtagattgcagacaacagtgtacacttttgtaccatgtcgatcatgatcatatgaaagagatacacaggaggaaaaaaaaaaaaaaaaaaaaaaaaaaaaaaaaagaaaaaaaaaaaaaaaaa

SEQ ID NO: 9510 - protein, 515 aa, Zea mays
  misc_feature: Ceres CLONE ID no. 1529487
  misc_feature: Ceres CDNA ID no. 40352023
  misc_feature (30)..(497): Pfam Name: p450 PFAM Desc: Cytochrome P450
MICYMLWLAACCLLLLYSVRFRSGWSHGNGPRSYPVIGCLVDFYKNRWRLLDWYTELLAASPTQTIVVDRLGARRTVVTANPVNVEHILKSNFGNYPKGKPFTDILGDLLGTGIFNVDGELWYAQRKLVSHEFSARALRELEFAVLEDEARERLVPALGLAAARGDVVDMQDLLRRFSFDVICRVSLGVDPGCLDPALPAPRLAAAFDAAAGIIARRGAAPVAAVWKAKRALDVGSERQLREEIAVIHEAVMDLIHIRKKECGLRVNGGDGRRSDLLSRMIECGYPDEAIRDMVISFIMAGRDTTSSALTWFFWLLTRHRDVEREVLREITGGGASHAAAGGQGKMRALHAALCETMRLYPPVAWDSKHAAAGDVLPDGTRVERGDRVTYFQYGMGRMESIWGADAGEFSLRRWLSIIPEENAAPAPPAAVAGLSPFKYPVFQAGPRTCLGKEMAFVQMKFVASTVLRRFELVPVDEGRVPVFLPLMTAHMGDGLNVTVRSRSGEHVASAASSGN

SEQ ID NO: 9511 - DNA, 928 bp, Zea mays
  misc_feature: Ceres CLONE ID no. 1529655
  misc_feature: Ceres CDNA ID no. 36707533
  CDS (197)..(610): REFERENCED BY SEQ ID NO: 9512
actgtccattcggtgttatctctgggtatgtgtggtactaacccgatctgtccgttcactactcgattagggtctccttctccagcttgtgagatcgacactggttgacactgattgtagcacttcgtggcgccttattgggtcgcgggtgcggtttgcgctctacaaattttgggtttggtttcgctgaaccctcatgacccaagcgaagtccactcctgggaggagggagatgggccgggcgcgatcgccggaaccgctcgatttcttcatatggactgtcgaggatgttggattatggctggaagaaataaatcttggtggctacagacaagtatttcaagaaaatagtgtcaatggagaatatctagaaagcttgtccatgtttactactgagcagattctgcgctttattaggcggtgccatatgaaatggggagactttatcacactgtgcaaagagttgaggcgcattaaagtggcgtgccttaaaggggagcaagaagtccgcaggccatggtgggcgccggcatgcctctccgtagttttcgtgagggcagccaagcagaacaggaagtcccgtgttgtctcgttgaagctggaaccataatgcttgtcaagcacttcgaaccgtcgtgcgctagcctaaagtggtatggaagctgttttcgctctgggtgcatcatgctcaactagtctgtcttatcccttgttagttcttcatatataaggtttggaacagtaatctgttgtagacaaagaaagaaacatataggtgatttgacgactagggaattggaggggatctattgaggaaatcctcttgctattcaagggattttccatggattctcttcaattcctggtcaccaaaccagcccataatatgcagatgtttcctggctccctacaaaaaaaaaaaaaaaaa

SEQ ID NO: 9512 - protein, 125 aa, Zea mays
  misc_feature: Ceres CLONE ID no. 1529655
  misc_feature: Ceres CDNA ID no. 36707533
  misc_feature (13)..(44): Pfam Name: SAM_1 PFAM Desc: SAM domain
  misc_feature: Homolog of GI Number: 77556324 NR Desc: AC009176 putative heat
MGRARSPEPLDFFIWTVEDVGLWLEEINLGGYRQVFQENSVNGEYLESLSMFTTEQILRFIRRCHMKWGDFITLCKELRRIKVACLKGEQEVRRPWWAPACLSVVFVRAAKQNRKSRVVSLKLEP

SEQ ID NO: 9513 - DNA, 411 bp, Zea mays
  misc_feature: Ceres CLONE ID no. 1529943
  misc_feature: Ceres CDNA ID no. 35383448
  CDS (44)..(316): REFERENCED BY SEQ ID NO: 9514
aagaccggaaaaccccatctcccccgccgccccaccacgcacgatggccgccgtaaggtcgctgctccgctcgtcggcctcccttcttcgcgccgcccccgccctcgcgagatcctcggctaccacgcgtccgtctcttcggcgcgcattggctgctcctcctcgccttctccggtcgcccgtcgagtcgagcttctgcgtggagtcgcttctgcctctgcacaccgccaccgccggtgcacgcatgacgtccatgctcgccgctcctggccaaggcctcggctggctcacccaagctgaaactgacggagtataacgccccctgtgggtgctcccctttaggaaccaggacatcaattgtgcttcgagttcttctgtgcctggaggaaacaggaagagttgaaaaaaaaa

SEQ ID NO: 9514 - protein, 90 aa, Zea mays
  misc_feature: Ceres CLONE ID no. 1529943
  misc_feature: Ceres CDNA ID no. 35383448
  misc_feature: Homolog of GI Number: 34904474 NR Desc: OSJNBa0086P08.16
  misc_feature: Homolog of GI Number: 34909334 NR Desc: OSJNBb0021A09.13
MAAVRSLLRSSASLLRAAPALARSSATTRPSLRRALAAPPRLLRSPVESSFCVESLLPLHTATAGARMTSMLAAPGQGLGWLTQAETDGV

SEQ ID NO: 9515 - DNA, 740 bp, Zea mays; identical to SEQ ID NO: 4893
  misc_feature: Ceres CLONE ID no. 1529961
  misc_feature: Ceres CDNA ID no. 36706328
  CDS (1)..(531): REFERENCED BY SEQ ID NO: 9516

SEQ ID NO: 9516 - protein, 62 aa, Zea mays; identical to SEQ ID NO: 4894
  misc_feature: Ceres CLONE ID no. 1529961
  misc_feature: Ceres CDNA ID no. 36706328
  misc_feature (3)..(61): Pfam Name: Ribosomal_S30 PFAM Desc: Ribosomal protein S30
  misc_feature: Homolog of GI Number: 55773694 NR Desc: 40S ribosomal protein S30
  misc_feature: Homolog of GI Number: 30102786 NR Desc: At5g56670
  misc_feature: Homolog of GI Number: 25295582 NR Desc: 40S ribosomal protein S30
  misc_feature: Homolog of GI Number: 6679753 NR Desc: Finkel
  misc_feature: Homolog of GI Number: 15822932 NR Desc: Finkel
  misc_feature: Homolog of GI Number: 36968262 NR Desc: Finkel
  misc_feature: Homolog of GI Number: 60678256 NR Desc: Finkel
  misc_feature: Homolog of GI Number: 47682823 NR Desc: MGC80045 protein
  misc_feature: Homolog of GI Number: 50603825 NR Desc: MGC89853 protein
  misc_feature: Homolog of GI Number: 63694872 NR Desc:  similar to Finkel

SEQ ID NO: 9517 - DNA, 1348 bp, Zea mays
  misc_feature: Ceres CLONE ID no. 1530076
  misc_feature: Ceres CDNA ID no. 36592392
  CDS (315)..(1142): REFERENCED BY SEQ ID NO: 9518
accctagaaaaactcccaaacgcgtccaaaacattctgcggcctgttggagggcagcaccaagtatcacagtctagctactgcctggcaccagcaagcttctgccctgccccgccccgccgccagaatccgaaaccagtaaaccacagcggcaacaacctcgcggcgcccgcgtggaggcaggcggcgcataaagccagccggcgctgctcctgctgtgcgcaacggtcccctcctcctcctcctcctccgctctcctctccccaaagtaataactagtaaacagagctgcgtccaggcttcttcgatcggtccatggctgtcgtcacgagggacgcggcgtgcctgcccctcgtcctcctgctcctagtcttctccgcggccccgtctccggctgacggctgcgaccgctgcgtgcgccggtccaaggccacctactaccaggcctcctcgctcgccctcaacgccgggtcgtgcgggtacggctccttggccgcgtccctcaacggcggcctgctcgccgcagccagccccgagctgtacaggggcggcgtcggctgcggcgcctgcttccaggtgcggtgcagggacagcgagctgtgcagcgccgccggcgccaaggtggtggtgacggaccaggcgcggacgtcgaaccgcacggcgctggtgctgagcgccgcggcgtacgcggccatggccagtgccggcaaggccgcgcgcctcagggaccggcgcgtcgtcgacgtcgagtacaagagggtaccctgcgagtacgcgaaggaccgcaacctgttgatacgcgtggaggagaagagccggccgccaagcaacctgtccatcaggttcctgtaccagggcggccagaccgacatcgtcgccgtcgacgtcgccaccgtggggtcgtccaactggcggttcatggcgcgggaccacgggccggcgtggagcacggcgcaggcgccgccggggccgctgcagttccggctggtggtgaccggtggctacgacggcaagtgggtgtgggcggagtcggaggtgctgccgcgccggtgggaggccggccgcgtctacgacgccggggtgcaggtctccgacgtcgcgcaggaagggtgctacccctgcgacacgcgcgagtggcagtgacgtgacgcgcgcacgggctggattgtagtagattgtacagtttttttttttggtcgggaatgggacgaaagatatgaaatgatgatgagcggagccggagagccgaatcaaaccaaatccaaaaaaaaaaaaaaaaaaaaaaaaaaaaaaaaaaaaaaaaaaaaaaaaaaaaaaaaaaaaaaaaaaaagaaaaaaaaaaaaaaaaa

SEQ ID NO: 9518 - protein, 275 aa, Zea mays
  misc_feature: Ceres CLONE ID no. 1530076
  misc_feature: Ceres CDNA ID no. 36592392
  misc_feature (159)..(243): Pfam Name: Pollen_allerg_1 PFAM Desc: Pollen allergen
  misc_feature (68)..(146): Pfam Name: DPBB_1 PFAM Desc: Rare lipoprotein A
  misc_feature: Homolog of GI Number: 37536544 NR Desc: putative pollen allergen
  misc_feature: Homolog of GI Number: 21654743 NR Desc: expansin
  misc_feature: Homolog of GI Number: 50919649 NR Desc: Putative pollen allergen
  misc_feature: Homolog of GI Number: 25136297 NR Desc: expansin
  misc_feature: Homolog of GI Number: 34901594 NR Desc: putative expansin protein family
  misc_feature: Homolog of GI Number: 21555265 NR Desc: Expansin
  misc_feature: Homolog of GI Number: 33111959 NR Desc: expansin
  misc_feature: Homolog of GI Number: 7270824 NR Desc: putative pollen allergen
  misc_feature: Homolog of GI Number: 54291022 NR Desc: pollen allergen
  misc_feature: Homolog of GI Number: 16517013 NR Desc: beta
MAVVTRDAACLPLVLLLLVFSAAPSPADGCDRCVRRSKATYYQASSLALNAGSCGYGSLAASLNGGLLAAASPELYRGGVGCGACFQVRCRDSELCSAAGAKVVVTDQARTSNRTALVLSAAAYAAMASAGKAARLRDRRVVDVEYKRVPCEYAKDRNLLIRVEEKSRPPSNLSIRFLYQGGQTDIVAVDVATVGSSNWRFMARDHGPAWSTAQAPPGPLQFRLVVTGGYDGKWVWAESEVLPRRWEAGRVYDAGVQVSDVAQEGCYPCDTREWQ

SEQ ID NO: 9519 - DNA, 1166 bp, Zea mays
  misc_feature: Ceres CLONE ID no. 1530893
  misc_feature: Ceres CDNA ID no. 35383449
  CDS (117)..(896): REFERENCED BY SEQ ID NO: 9520
agtctgtatacctgtcactcacgctaccgccgtgaccgatcatctcccactctctcgtcagatcctctcggctagctagctagctaggacagaggagggaggggaaggcgctggctatggcgactgcggcggcggcggcggcggcggccatggaggagccggacgtcgtcaacggccgcgacgtggtgagctgggtggcgtccggggtggtgctgtggtcgaccgccttcttgctggtgcgggcgctgttccccaagcgctcctacgacttctgcaaccgcgccgtctccaccatgcacgccgtcgccgccgtgtgcctcgcctgcctctccgtcgacgactggtcgtgccccgtctgcccgctcgccgccgcatcctcccctcgccagatgaaggcgctggcggttacgctggcgtacatggtgtacgacgcggcgtgctgccacctcaacggcgacacgcggctggacaacgccgtgcaccacctggtcagcatcgtcggcatcggcgcggggctcgcctaccagaggtgcgggacggagatggtggccagcatgctcgtgacggagatgtccagcccgctgctgcacctgcgggagatgctcaaggagctgggcgtgcgggacacggagctgaacctcctcgtcgacgtgctcttcgccgccaccttctccgccgcccggatgggcgtcgggccgtacctcacctacgtcaccgtgacggccgacaaccccatcctcatcaaggcgatggcgacggggctgcagctggtgagcgcctactggttcctgcggatcctcaggatggtcaggtacaagctcgccgtcgccggcaagaagaagccgctgccaccaccaacaacgccgcccaagctcgccgccgccaacaacaactgacgtaataagcgccggcgacaaacttcacgagctacgcacatttatttatgatatcgggagttggattcgatagaggccgtgctgtacatatagtacaaatacacacaccccgcctctgaagcaatgcaatgcaattgcaatgcaagcaatttctctccactgccaaggatgtgtgtcatctctcatcaaccaagtgtcggtgcgcgcgcgtagtagtactgtacccaactgtacgatgctagcgcaaaaaaagaaaaaaaaaaaaaaaaa

SEQ ID NO: 9520 - protein, 259 aa, Zea mays
  misc_feature: Ceres CLONE ID no. 1530893
  misc_feature: Ceres CDNA ID no. 35383449
  misc_feature: Homolog of GI Number: 25405881 NR Desc: protein F27F5.9
  misc_feature: Homolog of GI Number: 55637107 NR Desc:  similar to POU domain
  misc_feature: Homolog of GI Number: 66780032 NR Desc: Negative regulator of class I heat shock protein
  misc_feature: Homolog of GI Number: 66780099 NR Desc: PE
  misc_feature: Homolog of GI Number: 66776365 NR Desc: PE
  misc_feature: Homolog of GI Number: 66778264 NR Desc: LigA
  misc_feature: Homolog of GI Number: 66775827 NR Desc: OsmC
  misc_feature: Homolog of GI Number: 67987177 NR Desc: 4Fe
  misc_feature: Homolog of GI Number: 66776175 NR Desc: ABC
  misc_feature: Homolog of GI Number: 66779698 NR Desc: Oxidoreductase
  misc_feature: Useful for sterility
  misc_feature: Useful for sterility
MATAAAAAAAAMEEPDVVNGRDVVSWVASGVVLWSTAFLLVRALFPKRSYDFCNRAVSTMHAVAAVCLACLSVDDWSCPVCPLAAASSPRQMKALAVTLAYMVYDAACCHLNGDTRLDNAVHHLVSIVGIGAGLAYQRCGTEMVASMLVTEMSSPLLHLREMLKELGVRDTELNLLVDVLFAATFSAARMGVGPYLTYVTVTADNPILIKAMATGLQLVSAYWFLRILRMVRYKLAVAGKKKPLPPPTTPPKLAAANNN

SEQ ID NO: 9521 - DNA, 1591 bp, Zea mays
  misc_feature: Ceres CLONE ID no. 1530905
  misc_feature: Ceres CDNA ID no. 25446779
  CDS (117)..(1319): REFERENCED BY SEQ ID NO: 9522
aatcagagaagagataaccacacgtccacacaccacagaccacacgcacggtacagcctctccgcagctgcaggtgcctgctgttctccgacgagaccccaagaactcgccaacctatgccagccacccttccctcttccacaatgctggcctccgccgccaccgtgaagccctccaccgccgcggccgcggccacctgcaaggcggccttcaagccgctccacctccctcccctccccgccgccgccggcctcaggccgctctccctctccgtctccgcgcgcccgctgtaccgtcaggagcatgtcctcgcatccgtggcggtggcggcggctggccgcaacgaccgcgccgcgtcccccgcgccgccgtccgccaccgctgacggctcccggccgctggaggtcgccgcgccggcggagacgggtcggcgcgccaagatcggggtctacttcgccacgtggtgggcgctgaacgtgatcttcaacatctacaacaagaaggtcctcaacgcgttcccgtacccgtggctcacgtcgacgctctccctggccgccggctccgccatcatgctcgcgtcctgggccaccaggatcgccgaggcgccccagacggacctcgatttctggaaggcgctcactcccgttgcgatcgcgcacacgatcgggcacgtggcggcgacggtgagcatggccaaggtggccgtgtcgttcacgcacatcatcaagagcggggagccggcattcagcgtgctcgtctccaggttcttcctcggcgagcacttcccggcgccggtctacttctccctcctccccatcatcggcggatgcgcgctcgccgccgtcaccgagctcaacttcaacatggttggattcatgggggcaatgatctcgaacctggcattcgtcgtccggaccatcttctccaagaaggggatgaagggcaagtccgtgagcgggatgaactactacgcctgcctctccatcatgtcgctggtgatcctcctgcccttcgccatcgccatggaggggcccaaggtgtgggcggcgggctggcagacagcagtcgccgagatcggtcccaacttcgtctggtgggtggcggcgcagagcgtgttctaccacctgtacaaccaggtgtcctacatgtccctggacgagatctcgccgctcaccttctccatcggcaacaccatgaagcgcatctccgtcatcgtcgcgtccatcatcatcttccagacgcccgtccagcccatcaacgcgctcggggccgccatcgccatcctcggaaccttcatctactcccaggccaagcagtagccgcccttggcgcgcgcgtctggctctcaggcctcagttcagttcaccgccgaatcagctcggcgctcgaagatataacagattatataacttttgaggatatctacctagcttgtataatagtattattactagatcctctcttctttttttttcgtattttctttcctaggactagcttattactagatcatttcgtcgtcgtgttttcactatgactatgatgatgtagagagagagagagatgaatccatctaaaaaaaaaaaaaaaa

SEQ ID NO: 9522 - protein, 391 aa, Zea mays
  misc_feature: Ceres CLONE ID no. 1530905
  misc_feature: Ceres CDNA ID no. 25446779
  misc_feature (109)..(234): Pfam Name: DUF6 PFAM Desc: Integral membrane protein DUF6
  misc_feature: Homolog of GI Number: 3367515 NR Desc: Similar to glucose gbAF020814 from Pisum sativum.
  misc_feature: Homolog of GI Number: 50941819 NR Desc: glucose
  misc_feature: Homolog of GI Number: 14150753 NR Desc: glucose
  misc_feature: Homolog of GI Number: 32401390 NR Desc: glucose
  misc_feature: Homolog of GI Number: 18407336 NR Desc: glucose
  misc_feature: Homolog of GI Number: 2997591 NR Desc: glucose
  misc_feature: Homolog of GI Number: 2997589 NR Desc: glucose
  misc_feature: Homolog of GI Number: 9295277 NR Desc: glucose
  misc_feature: Homolog of GI Number: 61651604 NR Desc: plastidic glucose 6
  misc_feature: Homolog of GI Number: 50937877 NR Desc: putative glucose
MLASAATVKPSTAAAAATCKAAFKPLHLPPLPAAAGLRPLSLSVSARPLYRQEHVLASVAVAAAGRNDRAASPAPPSATADGSRPLEVAAPAETGRRAKIGVYFATWWALNVIFNIYNKKVLNAFPYPWLTSTLSLAAGSAIMLASWATRIAEAPQTDLDFWKALTPVAIAHTIGHVAATVSMAKVAVSFTHIIKSGEPAFSVLVSRFFLGEHFPAPVYFSLLPIIGGCALAAVTELNFNMVGFMGAMISNLAFVVRTIFSKKGMKGKSVSGMNYYACLSIMSLVILLPFAIAMEGPKVWAAGWQTAVAEIGPNFVWWVAAQSVFYHLYNQVSYMSLDEISPLTFSIGNTMKRISVIVASIIIFQTPVQPINALGAAIAILGTFIYSQAKQ

SEQ ID NO: 9523 - DNA, 1079 bp, Zea mays
  misc_feature: Ceres CLONE ID no. 1531507
  misc_feature: Ceres CDNA ID no. 25446199
  CDS (281)..(901): REFERENCED BY SEQ ID NO: 9524
actataaacaacatcctcacatcaagtaagacagggagagagaaactagactgcagggtgccgggcagccaaggcccaagttgtttcgactaaaaaggctttgttgtgttttcttgcaactttcctgcatttgattcctgtttccatcatattagttttgaagtagtagtttttttgttgacatttgcaacatctcttgttctttgtttttttactatagttgatgtatttttgacagctgttaattctattcaactaagtgaatattacctttcaggttatgcgtcctcagcatggtgtggaattctctatgaaagaggtgaattcaactagttggaatgttggtgaaacaccaaatattctagtaccaatcgctaatgggacagaggagatggaagcaactatgataattgacattttgcgtagggcgaaagcaaatgttgtggttgcctccttggaagacaagctagagattgttgcatccaggaaggtgaagatgattgctgatgtgctgttggatgatgctcttaaggagcaatatgatctcattctgttacctggaggtctgggtggtgcagaagcatatgcaaaatctgataaactaatggatctgatcaagaagcaagctgaggcaaatagattgtatggagctatatgtgcctcccctgcgattgctcttgaaccacatggcctactaaagggaaagaaagttacatcctatcctgctatgtggaacaaacttgcagaccaaagcgaatgcaacaacagagttattgttgatggtaacctaatcaccagccaaggtcctgggacttctatggaattctcgcttgccatagtggagaaactctttggacgggagagagcccttgagctggccaaatccatggtttttatttgagttgaaatggtacgtgtacgtattaggtttctggagtatgtacttgtgtaaatcgaggcatgctatgttctttttcttgtggaatgtacttcaaatccccttttaaatagaaataagacgaacgcttgtaatgtgtttcatatgcagtaaaaggtttgagccaaaaaaaaaaaaaaaa

SEQ ID NO: 9524 - protein, 196 aa, Zea mays
  misc_feature: Ceres CLONE ID no. 1531507
  misc_feature: Ceres CDNA ID no. 25446199
  misc_feature (43)..(181): Pfam Name: DJ PFAM Desc: DJ
  misc_feature: Homolog of GI Number: 53791962 NR Desc: putative 4
  misc_feature: Homolog of GI Number: 21536528 NR Desc: 4
  misc_feature: Homolog of GI Number: 34904026 NR Desc: P0665D10.11
  misc_feature: Homolog of GI Number: 56201615 NR Desc: putative 4
  misc_feature: Homolog of GI Number: 33149230 NR Desc: ThiJ
  misc_feature: Homolog of GI Number: 13194800 NR Desc: putative 4
  misc_feature: Homolog of GI Number: 56201611 NR Desc: putative 4
  misc_feature: Homolog of GI Number: 65302953 NR Desc: 4
  misc_feature: Homolog of GI Number: 15894907 NR Desc: Putative intracellular protease/amidase
  misc_feature: Homolog of GI Number: 62516186 NR Desc: COG0693: Putative intracellular protease/amidase
MKEVNSTSWNVGETPNILVPIANGTEEMEATMIIDILRRAKANVVVASLEDKLEIVASRKVKMIADVLLDDALKEQYDLILLPGGLGGAEAYAKSDKLMDLIKKQAEANRLYGAICASPAIALEPHGLLKGKKVTSYPAMWNKLADQSECNNRVIVDGNLITSQGPGTSMEFSLAIVEKLFGRERALELAKSMVFI

SEQ ID NO: 9525 - DNA, 1007 bp, Zea mays
  misc_feature: Ceres CLONE ID no. 1531517
  misc_feature: Ceres CDNA ID no. 25446200
  CDS (419)..(697): REFERENCED BY SEQ ID NO: 9526
agggccattcgtcgtctccgttgtctttgttgcagatcggtgctcctctcaccaccaggccgccacagctcgccggctttcccctccctgccatcgagcaccacctggtacgctctccgcttgatctccccttcctgctgcggagccgtgcgagcaaaccttaacgtagtccgtaggtacgccctccccttgttcttcccttcctcctgtgcgaaaccgtgcgtccaaaccctaacatactattcgtactcggacctaaatctaatgacaagtgtatatgcatgcattacgcctacagccaactaacttcgattgctctgcaaaaattatggagtgtagtgtacatgtgtatacccatgtccttcactgagtccacccctgcttgacagagcaaacagagcaaggaaatagtttaagaatggctgcgcggagcagttctatggttgtcgaggatgactacgagacggatcagaagaagcaagctgctgcagatgttctttttcactattcacaatttgttatggtttgcattggtgaggatgttcgccctactgatctcaggttacatcttatgaaggaagtttcaggaatgtccacttctctgaaggagcctcaacaggctgctgcctcaccggcttccagtggggaaccgtcttcctctggaacgatgaaaggtgacaagaatgaaatctcctaagcttcataaattattatccaactcaggacttcttctgttccttacgcactgagaagattgtaatgttcagaacttcggatgatgaggcttacttgcaatataggaatgtaaatatgttaggaacattgttcatagctgtctgctgttctgctgctttagcttctttcgtgacagcctgcttcatgtatgaaactttgaatccatttttattcagggggcagtaacgtaaatgctgttgtaattttttttaaatggcaggtgaatattgtattctgaataagtcatgtttgctacaaaaaaaaaaaaaaaa

SEQ ID NO: 9526 - protein, 85 aa, Zea mays
  misc_feature: Ceres CLONE ID no. 1531517
  misc_feature: Ceres CDNA ID no. 25446200
MVVEDDYETDQKKQAAADVLFHYSQFVMVCIGEDVRPTDLRLHLMKEVSGMSTSLKEPQQAAASPASSGEPSSSGTMKGDKNEIS

SEQ ID NO: 9527 - DNA, 1034 bp, Zea mays
  misc_feature: Ceres CLONE ID no. 1531562
  misc_feature: Ceres CDNA ID no. 36690959
  CDS (209)..(865): REFERENCED BY SEQ ID NO: 9528
acttttttttctctcatccgaattcccaggcaggcaggtcggcgaggagggcaggaagaccgaagaccgagccgtgcgggggctcgggacgggaacgggacaggaccccaaaatctcagatccttcctgcccgcccgcccgtgcccgtcgacgcgtcgttcttgccggccgcgccccacctccgccctctcctcctccaggctgcgcgatggtgctgtgggtcttcggctacggctccctcatctggaaccccggcttcgacttcgacgacaaaatcctcggcttcatcaagggctacaagcgcacctttaatctcgcttgcattgaccacagaggcacaccggagcatccggcgaggacctgcacgcttgaaaccgacgacgaggccatatgctggggaattgcatattgtgtcaagggtggtccagaaaaagagctaaaagcaatgcagtacttggagagaagagagtgtgagtacgaccagaaaatatccattgatttctacaaggaaggagatcccttgaaaccagctgtgacgggcgtcttagtgttcgtttccactccagatccaattggcaacaagtactatcttggccctgctcctctgcaggatatggcaaggcaaattgctacagccaatggccctactggctataatagggattacctgttctcaatggagaaggcattagccagcattagccacgaagatgattcgatcatagagcttgcaaacgaggtgaggaaggtgctcaacagaacaaaggagaccaagatcactggtgccaatgcttccctgaaatcacatgcccctcttgtgcacctgtccgcgcttccagaaggcaccgttgtggactcgagatagcgacctctactcggaatttactttcagctcttgcatgtttgtggttgtggccatcatgtactgattttcccttttcaacagttgtcgtgaggctgtatcgtctggagtaaaaaaaaatgctaaaagccggcactaataatgatattaacttgaaaaaaaaaaaaaaaaa

SEQ ID NO: 9528 - protein, 218 aa, Zea mays
  misc_feature: Ceres CLONE ID no. 1531562
  misc_feature: Ceres CDNA ID no. 36690959
  misc_feature (3)..(181): Pfam Name: ChaC PFAM Desc: ChaC
  misc_feature: Homolog of GI Number: 50908085 NR Desc: putative OsCTTP
  misc_feature: Homolog of GI Number: 30102602 NR Desc: At4g31290
  misc_feature: Homolog of GI Number: 27525010 NR Desc: putative cation transporter
  misc_feature: Homolog of GI Number: 76573349 NR Desc: meloidogyne
  misc_feature: Homolog of GI Number: 82623379 NR Desc: ChaC
  misc_feature: Homolog of GI Number: 31711499 NR Desc: OsCTTP
  misc_feature: Homolog of GI Number: 73970152 NR Desc:  similar to CG2540
  misc_feature: Homolog of GI Number: 54637559 NR Desc: GA10276
  misc_feature: Homolog of GI Number: 62645612 NR Desc:  similar to RIKEN cDNA 1810008K03
MVLWVFGYGSLIWNPGFDFDDKILGFIKGYKRTFNLACIDHRGTPEHPARTCTLETDDEAICWGIAYCVKGGPEKELKAMQYLERRECEYDQKISIDFYKEGDPLKPAVTGVLVFVSTPDPIGNKYYLGPAPLQDMARQIATANGPTGYNRDYLFSMEKALASISHEDDSIIELANEVRKVLNRTKETKITGANASLKSHAPLVHLSALPEGTVVDSR

SEQ ID NO: 9529 - DNA, 1077 bp, Zea mays
  misc_feature: Ceres CLONE ID no. 1531632
  misc_feature: Ceres CDNA ID no. 36706857
  CDS (81)..(857): REFERENCED BY SEQ ID NO: 9530
aaatcccttcgcgcacgcaacgcaaaaacaagcacaaacacgcgcgatccgatctgggccggccaagcagccacccatccatggcgactagggtttggctcaccgccctcctgcttggtttcctcgtcgccgcctcccccttcaccagccgagttgctagagctgaatccgaggaagatgctgctgcagctgaggttgttgaaggggctgatctaggtattgtgggtgatgatacacaggtttccagtgatggacctttaagtcctgctcctggtgtagagacagtagttgtcttcccaaaaaatgctggcaaaattgtactagcaggtgaagaaactgaattactagttggtctgcaaaatgacggtgaatcaattttgaatgttgttgctgttcattcaactctccatcttccttttgaccacaatatgtatggccagaaccttactgttcagaatttcttcaattcatcagttcctgtttctgtgcaagcaaccttcccctacaagttcgttgtgagcaagttcttgcagcctggagcatatgatctggttggttacatagtgtatgagatcgaccagcacccttaccagaatgtattctacaatggcactatcgaggttgttgaggctggaggcttactcagtgttgagtctgtgttcctcatcacccttggatttgcacttcttggtctgtttggattgtgggcatatggccaggttcagcagctctcgaagaaaacaaagaaggcacccaaggtggagctcggaactggaacaactgatgccaacatcgatgagtggctggagggcacttcgtttgtgcagagaagcaaatccaagaagaagcagacctgagtctctccaggcttagttaaatccttttgaggatctagaatgaggcatttgagggtagcccttcacaagtgacttttgcagaaagatagatgcgtaaggaggtgctgaaaaccgtaaatatcttcattgacattttcgaccttagtgtactttacatggaacaaaattttgttaaaagaaagtatatgctgtggtttctgatcaaaaaaaaaaaaaaaaa

SEQ ID NO: 9530 - protein, 258 aa, Zea mays
  misc_feature: Ceres CLONE ID no. 1531632
  misc_feature: Ceres CDNA ID no. 36706857
  misc_feature (6)..(258): Pfam Name: TRAP_alpha PFAM Desc: Translocon
  misc_feature: Homolog of GI Number: 53791783 NR Desc: putative SSR alpha subunit
  misc_feature: Homolog of GI Number: 21555380 NR Desc: putative signal sequence receptor
  misc_feature: Homolog of GI Number: 20197721 NR Desc: putative signal sequence receptor
  misc_feature: Homolog of GI Number: 547391 NR Desc: alpha
  misc_feature: Homolog of GI Number: 50897256 NR Desc: At2g16595
  misc_feature: Homolog of GI Number: 20198182 NR Desc: putative TRAP protein
MATRVWLTALLLGFLVAASPFTSRVARAESEEDAAAAEVVEGADLGIVGDDTQVSSDGPLSPAPGVETVVVFPKNAGKIVLAGEETELLVGLQNDGESILNVVAVHSTLHLPFDHNMYGQNLTVQNFFNSSVPVSVQATFPYKFVVSKFLQPGAYDLVGYIVYEIDQHPYQNVFYNGTIEVVEAGGLLSVESVFLITLGFALLGLFGLWAYGQVQQLSKKTKKAPKVELGTGTTDANIDEWLEGTSFVQRSKSKKKQT

SEQ ID NO: 9531 - DNA, 1124 bp, Zea mays
  misc_feature: Ceres CLONE ID no. 1531699
  misc_feature: Ceres CDNA ID no. 25446780
  CDS (114)..(908): REFERENCED BY SEQ ID NO: 9532
aaactcggccgtccgaacgaaagcgaagcgcggccaaactcactcgctaaacgctcccgttctcctccgcctgcccccaccggctccccttgtacacgagcgccggagacgccatggcggcggcgcagccgaagccggccaagaggctgggcggcatggcggaggcgctcgccatcgccgccgacctcggattccccgcctctaccacgcaggaagatcagactagctccgacaaaagcgatgatttggtgaaggttttgagggaactgactgtcgtgcagaggaacattgccaacttgcaagtggagctacagggaagaaaggatgataaaaacattgctcatttgactcatgtgagtgagatggaaaagaagtgcgagtctttggccagaatgactgcaattttgaaagatgtaattcagaacaaggatcgtattattgctcggctgcaacagccttattcccttgactgcataccagttgaagctgaataccagaaacaattctcggagctacttctgaaagcagcaagtgactatggggcattgacagcatcagtcggcgatttccagtggagccaaaactttagggaatcaccagctgtctggggggaaatgctgcgaccgattcctgctgcacttgcttcctgcacccggttcttcgaggcaatgtctgcgatgagggaatccttttctactcttcagaaactacgcgttggccattcctctctgtcaataaccccaagtgactccagcgacgattcaaagttcttgacgccacctcagtggagagacggctcgatactcgatagctggaagcaaatggatgacatcaacctggagagcagtggaattgacgccatgaatcagaggaggttgtcttggccctccatcaagagggacccgtaggtcgcaggtcacccattggatttaggttcccatgttacataaataggattccaccttgtgtagttggcattgattctctgtatttttaatccgatcacctgcacccatttggcatgttcgacttgtgagagatggtctataagttccttaaatcaatgtcgtggcaaaatttgatatgttttaggcccctttggcagggcaaaaaaaaaaaaaaaa

SEQ ID NO: 9532 - protein, 264 aa, Zea mays
  misc_feature: Ceres CLONE ID no. 1531699
  misc_feature: Ceres CDNA ID no. 25446780
MAAAQPKPAKRLGGMAEALAIAADLGFPASTTQEDQTSSDKSDDLVKVLRELTVVQRNIANLQVELQGRKDDKNIAHLTHVSEMEKKCESLARMTAILKDVIQNKDRIIARLQQPYSLDCIPVEAEYQKQFSELLLKAASDYGALTASVGDFQWSQNFRESPAVWGEMLRPIPAALASCTRFFEAMSAMRESFSTLQKLRVGHSSLSITPSDSSDDSKFLTPPQWRDGSILDSWKQMDDINLESSGIDAMNQRRLSWPSIKRDP

SEQ ID NO: 9533 - DNA, 1678 bp, Zea mays
  misc_feature: Ceres CLONE ID no. 1531701
  misc_feature: Ceres CDNA ID no. 40041450
  CDS (84)..(1280): REFERENCED BY SEQ ID NO: 9534
aaggcctctcgccgcgccatttccaccttaaaactgatcccttcgcttgaatctcccttcttcttaaaatagatcgcgcgcgcatgatgacagtcgaccttggcctgcaggcggcgccgccgccgtcgtcttccggcggcgtgccgagcagttgcacggcgctgccgccggggttccggttccaccccacggacgaggagctcatcgtccactacctccgcaagcgcgcggccgcggcgccgtgcccggcccccgtcatcgccgaggtcgacatctacaagttcgacccatgggacctgccagccaaggcggttttcggggaggcggagtggtacttcttcagcccgagggaccgcaagtaccccaacggcgtgcgccccaaccgcgccgccgggtcaggctactggaaggccaccggcaccgacaagcccatcacgctctcctcctcctcctcctcctccgccgccgccgccgccggcatgatcggcgtgaagaaggcgctcgtcttctacagggggcggccgcccaagggcgtcaagacgagctggatcatgcacgagtaccgcctcgccgaggcgctccacgccgtcgtcaacgcctacagacccacgcggttcaagaacaacgcctcgtcgtccatgaggctggacgactgggtgctgtgcaggatctacaagaagaccaccccgcagctggcgtacagcatgtcgccgccgccgcacgaggaggtggaggcgtcgtcgacgtcgttcatggacggcggcggcggcttcgacctcagccgcctgcacccggcggacgactccgcctccgtctccgccgacgacgacatcatggcgttggcggcggcggcggccacgtcgtactacgccgcccggccgctgccgcgcccggcgtccatctcggactacctcctcgactactcggccgtgtccgagctgttcgaggccaccccgctaacggagacgacggcgcagcccgggacggcgacggacgcagcaggcgggttctactacgacttcggtaacggcggcggcgagcctgctgcagccgcctccgtagtagcgcagcagcatcagctgagcccactcaagaggcggtcttccgtggacgaggataactgcaacggtggcattactgacatgctgcacgcttcgtcgtcgtccagcagcaagagggtgatgggcgatcatcactcatcgtcgtcgtccatggctgcaaacagctccgtgtttgagcccggacagacttcttctcatcagctgcacgacagaatatgacgcagcagcatgcatgcatgggtggtcgctccctcgctgctgattatgctagggctagctaggaaagaataccgctgctgattattaatttcattagtattcatgattgataaggaaggaattcaacatttatggattattagtatatattatatatgtagttataaataatatatatacttacccaagtttatattgtaactgtgtaaaaatagattgattagagcaaaaggatatttacagtgacgatttcactggctatagttagatctgattgtagctagatgtaatgcacctaggtagctataggttgtaacatgcatgtaagaacacatttgttgaataagatcccataatatgtataaaaatctgttttccactaaaaaaaaaaaaaaaaa

SEQ ID NO: 9534 - protein, 397 aa, Zea mays
  misc_feature: Ceres CLONE ID no. 1531701
  misc_feature: Ceres CDNA ID no. 40041450
  misc_feature (26)..(162): Pfam Name: NAM PFAM Desc: No apical meristem
  misc_feature: Homolog of GI Number: 34902154 NR Desc: Putative NAM
  misc_feature: Homolog of GI Number: 77548469 NR Desc: No apical meristem  protein
  misc_feature: Homolog of GI Number: 34899790 NR Desc: putative OsNAC5 protein
  misc_feature: Homolog of GI Number: 77552909 NR Desc: No apical meristem  protein
  misc_feature: Homolog of GI Number: 7021736 NR Desc: putative jasmonic acid regulatory protein
  misc_feature: Homolog of GI Number: 29029082 NR Desc: At3g04070
  misc_feature: Homolog of GI Number: 6223651 NR Desc: NAM
  misc_feature: Homolog of GI Number: 21593425 NR Desc: NAM protein
  misc_feature: Homolog of GI Number: 34894054 NR Desc: putative OsNAC5 protein
  misc_feature: Homolog of GI Number: 4325286 NR Desc: NAC domain protein NAM
  misc_feature: Useful for accelerating crop development and harvest
  misc_feature: Useful for increasing chlorophyll and photosynthetic capacity
  misc_feature: Useful for making ornamental plants with modified flowers
  misc_feature: Useful for making plants with increased biomass and foliage
  misc_feature: Useful for making shorter plants
  misc_feature: Useful for sterility
MTVDLGLQAAPPPSSSGGVPSSCTALPPGFRFHPTDEELIVHYLRKRAAAAPCPAPVIAEVDIYKFDPWDLPAKAVFGEAEWYFFSPRDRKYPNGVRPNRAAGSGYWKATGTDKPITLSSSSSSSAAAAAGMIGVKKALVFYRGRPPKGVKTSWIMHEYRLAEALHAVVNAYRPTRFKNNASSSMRLDDWVLCRIYKKTTPQLAYSMSPPPHEEVEASSTSFMDGGGGFDLSRLHPADDSASVSADDDIMALAAAAATSYYAARPLPRPASISDYLLDYSAVSELFEATPLTETTAQPGTATDAAGGFYYDFGNGGGEPAAAASVVAQQHQLSPLKRRSSVDEDNCNGGITDMLHASSSSSSKRVMGDHHSSSSSMAANSSVFEPGQTSSHQLHDRI

SEQ ID NO: 9535 - DNA, 949 bp, Zea mays
  misc_feature: Ceres CLONE ID no. 1531711
  misc_feature: Ceres CDNA ID no. 25891936
  CDS (42)..(698): REFERENCED BY SEQ ID NO: 9536
aacaaggccgagcagaggcagaggcagaggcagttcctctcatggaggcgtccttgctcgtggctcccaagccttccatgcccaggaccatcttctccgccaggcgagccggtcggagttggaggtgcctcgtcgtcgctgccaccatcaagcaacaactcggcacacggtcagaaagtgtggacgtcgatgcgccggtcgagcacctagcgccgccttcgaaggcgacgacgggagctcgcggcggcctgctcgccgccgtggcgacgacaacgagcagctgcacggcagtgttaccgtgtcacgccttatcaggcgccggagcggtggaatcgggaccgtggtggtggacgtcgccgctggacaccctgtaccgcgcggcggcggtgctgggcgacctggacccggcgacggcgcgggcggtggcgggcgtggcggggccggtgctgtcggcgttcggcttcctgttcatcctgcggatcgtcatgtcgtggtacccgaggctccccgtgacggagttcccgtacgtagtggcgtacgcgcccacggagccgttcctcgccgtcacgcgcagggtcatcccgccgctcggcggcgtcgatgtcacgcccgtcgtctggttcggcctcgtcagcttcgccagcgagatcctcgtcgggccacagggcctgctcgttctcctctcgcagcagcgctagcgaccactgcgtttctgcttccattccttcgatgaacaaattagtagtcatttttacaatggcacacttcgtgccatatccatttgattttaagatgattttaggttgtcttcagctatcgtgcccttaattatatattggtacgctattcctatatatttcgcatgcctaaattttagaagaaaataattattgtaccaccaattagtataaataatttatcattttatggctaaaaaaaaaaaaaaaaa

SEQ ID NO: 9536 - protein, 218 aa, Zea mays
  misc_feature: Ceres CLONE ID no. 1531711
  misc_feature: Ceres CDNA ID no. 25891936
  misc_feature (128)..(207): Pfam Name: YGGT PFAM Desc: YGGT family
  misc_feature: Homolog of GI Number: 34905892 NR Desc: P0458E05.22
  misc_feature: Homolog of GI Number: 57900169 NR Desc: YGGT family protein
  misc_feature: Homolog of GI Number: 23129461 NR Desc: COG0762: Predicted integral membrane protein
  misc_feature: Homolog of GI Number: 48893251 NR Desc: COG0762: Predicted integral membrane protein
  misc_feature: Homolog of GI Number: 33239527 NR Desc: YGGT family membrane protein
MEASLLVAPKPSMPRTIFSARRAGRSWRCLVVAATIKQQLGTRSESVDVDAPVEHLAPPSKATTGARGGLLAAVATTTSSCTAVLPCHALSGAGAVESGPWWWTSPLDTLYRAAAVLGDLDPATARAVAGVAGPVLSAFGFLFILRIVMSWYPRLPVTEFPYVVAYAPTEPFLAVTRRVIPPLGGVDVTPVVWFGLVSFASEILVGPQGLLVLLSQQR

SEQ ID NO: 9537 - DNA, 508 bp, Zea mays
  misc_feature: Ceres CLONE ID no. 1531754
  misc_feature: Ceres CDNA ID no. 25446201
  CDS (94)..(381): REFERENCED BY SEQ ID NO: 9538
aagggcctctcgatcgctcatcagtcgccagaggagtagttgatcgaggtgagtgaggttgaaaagcaggcggcgaacaaaggcaccatcgtcatggacggcggatactacggcggccgcgatcagcgctacagcggcgggtactacggcggcggtggcatcgcgacgccggggtacgctccggcgttcccgtacgggatgtcgcaggtgaacatcgagggcaacgggtgcgggcgggcgctgccgccgcagccgaccgtgaaggtgtactgccgcgccaaccccaactacgccatgagcgtccgcgacgggaaggtggtgctggcgccggcgaaccccaaggacgagtaccagcactggatcaaggacatgctttcttagtttctttccatgtttctcggatctgttgtgttacctttattactgtgtatttgcatatctactgtgatgctatatatgcactgtgccgtttgtttcctaaaaaaaaaaataaaaaaaaaaaaaaaaa

SEQ ID NO: 9538 - protein, 95 aa, Zea mays
  misc_feature: Ceres CLONE ID no. 1531754
  misc_feature: Ceres CDNA ID no. 25446201
  misc_feature: Homolog of GI Number: 50940091 NR Desc: r40g3 protein
  misc_feature: Homolog of GI Number: 66277464 NR Desc: stress responsive protein
  misc_feature: Homolog of GI Number: 1296955 NR Desc: osr40c1
  misc_feature: Homolog of GI Number: 34902150 NR Desc: Putative r40c1 protein
  misc_feature: Homolog of GI Number: 1658313 NR Desc: osr40g2
  misc_feature: Homolog of GI Number: 50940087 NR Desc: r40g2 protein
  misc_feature: Homolog of GI Number: 50940089 NR Desc: putative r40c2 protein
  misc_feature: Homolog of GI Number: 50940085 NR Desc: putative r40c1 protein
MDGGYYGGRDQRYSGGYYGGGGIATPGYAPAFPYGMSQVNIEGNGCGRALPPQPTVKVYCRANPNYAMSVRDGKVVLAPANPKDEYQHWIKDMLS

SEQ ID NO: 9539 - DNA, 1615 bp, Zea mays
  misc_feature: Ceres CLONE ID no. 1532080
  misc_feature: Ceres CDNA ID no. 40041451
  CDS (116)..(1129): REFERENCED BY SEQ ID NO: 9540
aacatctctcgccttccatataacgagcgatcatcgtcaaggatcggtcggcgcgcgcgcgaggccaacggccggctggggttttagcttgctgctggcgccaggctatcccggcatggcgaagcagtcgtgctgccacaagaagaagcttaggagagggctctggtcccccgaggaggacgagaagctcatgaaccacattgccaagtacggccatggctgctggagctccgtacccaagcttgcaggcctcgacaggtgtggcaagagctgcaggctgaggtggataaactacttgaggccagacctcaagaggggcacattctcgcaagaggaggaggacctcatcatacacctccactccttgctgggaaacaagtggtctcagattgcggcccagctgcctggccggacggacaacgaggtcaagaacttctggaactcgtacatcaagaagaggctcagggagcgcggcatcgaccccgccacccaccagccgctcgccgagcctgccgcggccactgccgccgccgccgtcaccaccaccactacggtctcccgccgctcggtgtttggggacgtcgacctcatcccgactactgctactactacaatccaccaggcgccgccgccgtcgttcgagggcggctcaatgctggacggcgtgaagctagcggtggagctggactggcccgtcgcgggcgacggggtaacgtcaaggccatgctacctgcaggggggctgcttcgacatggacgcgctgcagcagcactgcggctccatgtccatcccgccggcgccggtcgtcccgtcggcctccgccagctccagcacgctgacctcgatggcggaagccgaacactgcagcaccaacaacgtcgccgccggcggcaacctcccatggctggatctcggggcaaacgcggtggctggcgccggcggccacgtcgtcggcagctgctacgccggcgcgctggacgagctcaggtggttggagtacttcgacagtgccttccaggccgccgagagccagcaaggcgccctgcagccggggcagtgtgtctacggcggcaaggatgacgtccccgtgcacttcgacgtccatggcgggctaagcaactggtgctagtccagtaatccatcacgtactcaatgcaaagaaaccacggaacaagaaacagtccagtgtgaattaattactgtctatatatagtctgcagatgcaaattcttacgggcatttcatctggtgttacccctcccccttcctattctcatgttgctgtgttgattagcagcggataaaagttcatgtgatgagtacatttgaagtgtttaacacacatgtaaagtaatacatacgctgttgttaattagtaaatactgcagagagagagagagagagagagagagagagagagagagagagatagagagggacagagatatgatgagtgggccatgcggttaaataaaaatgtgaattattatgtcattatctcagcatattaattatagcatgcatgcatgcacggattaatttgactttaaaaaaaaaaaaaaaaaaaaaaaaaaaaaaaaaaaaaaaaaaaaaaaaaaaaaaaaaaaaaaaaaaa

SEQ ID NO: 9540 - protein, 337 aa, Zea mays
  misc_feature: Ceres CLONE ID no. 1532080
  misc_feature: Ceres CDNA ID no. 40041451
  misc_feature (67)..(112): Pfam Name: Myb_DNA PFAM Desc: Myb
  misc_feature: Homolog of GI Number: 50920625 NR Desc: putative Myb
  misc_feature: Homolog of GI Number: 34913340 NR Desc: Myb
  misc_feature: Homolog of GI Number: 51854395 NR Desc: putative myb transcription factor
  misc_feature: Homolog of GI Number: 56605400 NR Desc: MYB18 protein
  misc_feature: Homolog of GI Number: 50900810 NR Desc: putative transcription factor
  misc_feature: Homolog of GI Number: 28628949 NR Desc: MYB2
  misc_feature: Homolog of GI Number: 12321342 NR Desc: DNA
  misc_feature: Homolog of GI Number: 3482929 NR Desc: Putative transcription factor
  misc_feature: Homolog of GI Number: 20465975 NR Desc: putative transcription factor protein
  misc_feature: Homolog of GI Number: 34913750 NR Desc: OSJNBa0051H17.23
  misc_feature: Useful for making plants with increased biomass and foliage
  misc_feature: Useful for making plants with increased biomass and foliage
MAKQSCCHKKKLRRGLWSPEEDEKLMNHIAKYGHGCWSSVPKLAGLDRCGKSCRLRWINYLRPDLKRGTFSQEEEDLIIHLHSLLGNKWSQIAAQLPGRTDNEVKNFWNSYIKKRLRERGIDPATHQPLAEPAAATAAAAVTTTTTVSRRSVFGDVDLIPTTATTTIHQAPPPSFEGGSMLDGVKLAVELDWPVAGDGVTSRPCYLQGGCFDMDALQQHCGSMSIPPAPVVPSASASSSTLTSMAEAEHCSTNNVAAGGNLPWLDLGANAVAGAGGHVVGSCYAGALDELRWLEYFDSAFQAAESQQGALQPGQCVYGGKDDVPVHFDVHGGLSNWC

SEQ ID NO: 9541 - DNA, 918 bp, Zea mays
  misc_feature: Ceres CLONE ID no. 1532115
  misc_feature: Ceres CDNA ID no. 25447077
  CDS (122)..(625): REFERENCED BY SEQ ID NO: 9542
aaccctactccatcttctcgtgttgttcggcgcacgcggagacagcccgcgatcccgatcccgatccttcttcacgcgaatctcgacgatcccccccttccttccttcaagatgccattttatgcggcacgacaagacgatgctcatcggtgctgaccccacgcacgtcggcgaccgctgcatcagggtcacaatccaccactgcttctttgacggcacgcggcagaggcacccccgcctccgcttcggaaaggttcacctctacaacaactacacgcgcagctggggcatctacgccgtctgcgcaggcgtagaggcccagatcgtgtcccagtgcaacatctacgaggcaggtggagggcccccaaagaagacaactgtattcaagtacatgccggagaaggccggcgaccgagaggacgtggtggcagggtcgatcagctcggaaggggacgccttcctcaatggcgcgctgccctgcctgatcgataaccctgggtctgtcttcaggccagaggagtactaccagcagtggaccatggagccagcgtcgccggcgctcaaggacataatacagctctgcgcaggatggcagccggtgccccgccccccgtatgatcgctgactttcatcattctgatatgctgcagctcgcttctgtaagaatattcgtttcacggaagcactgcatttgtatgcatctcatcctaggtaattcaacatttgtttcatggtagagcggcatttgtatgccactcctcttcatctgccccctctctgaaatgtagtagaaaagttgttatggttttctatttgtgtctttatttatggtacatacaattcccaatgtaaagatatttctctcgtccatagcagtacaatagcttttagttgtgaatgctgaaaaaaaaaaaaaaa

SEQ ID NO: 9542 - protein, 167 aa, Zea mays; identical to SEQ ID NO: 9508
  misc_feature: Ceres CLONE ID no. 1532115
  misc_feature: Ceres CDNA ID no. 25447077
  misc_feature (3)..(75): Pfam Name: Pec_lyase_C PFAM Desc: Pectate lyase
  misc_feature: Homolog of GI Number: 34913784 NR Desc: pectate lyase
  misc_feature: Homolog of GI Number: 30694193 NR Desc: pectate lyase family protein
  misc_feature: Homolog of GI Number: 42572687 NR Desc: pectate lyase family protein
  misc_feature: Homolog of GI Number: 7019647 NR Desc: pectate lyase
  misc_feature: Homolog of GI Number: 6682233 NR Desc: putative pectate lyase
  misc_feature: Homolog of GI Number: 34908076 NR Desc: P0506B12.27
  misc_feature: Homolog of GI Number: 56201953 NR Desc: putative pectate lyase
  misc_feature: Homolog of GI Number: 2196707 NR Desc: pectate lyase
  misc_feature: Homolog of GI Number: 50943521 NR Desc: putative Cup s 1 pollen allergen
  misc_feature: Homolog of GI Number: 9758606 NR Desc: pectate lyase

SEQ ID NO: 9543 - DNA, 666 bp, Zea mays
  misc_feature: Ceres CLONE ID no. 1532406
  misc_feature: Ceres CDNA ID no. 36706329
  CDS (1)..(342): REFERENCED BY SEQ ID NO: 9544
agaaggccctggcgggctttgttccactccaccttggccgctgttctcctcaccgcgcgtgcgctctctctctctctctctcggcgccgactcggctaccgccgccgccctacggaagcttcccaggtcttcgtcaggcttttctccggcaacgagcaccctgcacagatcgtgaacctgcacacctcaacgatagatggcggggttcagaagccttgcacccaagaccaggaacctggtggtggccgggggactgtctgccttcgtgctcggggtctactactacaccatgagagcggtgggaggcacggacgagctccaggtggcgatcgacaagtttgaggagacgaagaagcaggatgccgctagaaactctagctccagcgcaggaggatcataattcataaacacgcggacacgccctggatctgctgcaggctgacatggtagtggtacgacgacagtcacgtcgctcagtaggccatgaccatgcgttctgcttgtactgtggaataaataaatgatgggttatggtactctttatctggtagagcttggcagcttgtgctttgagggatgtaatagtggccccgatgtttgtattttcctggcgagccggaaattttgtggagtatttgcttgtgtgactcaaaaaaaaaaaaaaaa

SEQ ID NO: 9544 - protein, 67 aa, Zea mays
  misc_feature: Ceres CLONE ID no. 1532406
  misc_feature: Ceres CDNA ID no. 36706329
MAGFRSLAPKTRNLVVAGGLSAFVLGVYYYTMRAVGGTDELQVAIDKFEETKKQDAARNSSSSAGGS

SEQ ID NO: 9545 - DNA, 2122 bp, Zea mays
  misc_feature: Ceres CLONE ID no. 1532647
  misc_feature: Ceres CDNA ID no. 35383450
  CDS (405)..(1868): REFERENCED BY SEQ ID NO: 9546
aatcccagatcaggattagccgaccacccgccgaaggccagagagaaatatctcatcttctctccaccggatcggttcaatcgagagcgagggagaaagggaggtggtgcgtcgaggggggccgagattttgccggtttggagccagataggggtatgagctgcttcgcgcaccgccgccgctccgacgtcgcccgccgccaggacggcctcctcgtcttcgtcttcttcctctcgattcccatacgtaccagtagttttaatttaagtagtagtaattgtagtagcaatctcttgtaaactgcgctcgcctttgcgtgttcgtggtccttttgcgctttctcgtccctctttctctcaatctctccttattcttctccttccacggcgaagccggcggctggtatggatcccaatggcctcaaaactggaggccttttgctcccgaccatcgagaggcggtgcacgtcgcctccatccgtcattgtcatcggcggtggcatctcgggcgttgcagctgcccgtgccctctccaattcttcatttaaggtgactgttttggaatcgagagatcgtattggcgggcgcattcatactgataactcgtttggatgcccaattgatatgggagcctcatggctacacggcgtgtgcaatgagaatccactggcaccattgataagctatcttgggctgaggttataccgcacaagcgatgataactcagttctgtatgatcatgatttagaaagctatgctctctttgataaggatggtaatcaggtcccaaaggagacagtcgataaagttggagaaacattcgagagaattcttgaagagacggtgaaagtgcgcgatgagcaggaacacgacatgccactgctacaggcaatttctattgtgtttgagaggcacccccatctaaagcttgaagggctagatgatcaggtcttacaatggtgtgtctgccggcttgaggcatggtttgctgcagatgcagatgaaatatctctgaagaactgggatcaggagcgtgttcttactggtggacatggactgatggtaaatgggtactatcctgttattgaagctcttgctcaaggtcttgacatcaggcttaaccaaagggtcaccgaaattacccgccagcacaatggagtcaaggtcactactgaagatggcacaagctacttggccgacgcctgcataatctcagtgccactcggcgtgctcaaggcgaacgtaataaagttcgagcctgagctgccccagtggaagagctccgccatcgccgacctcggcgtgggcaccgagaacaagatcgccatgcacttcgacagggtcttttggcccaacgtcgaggtgctgggaatggtcgggccgacgcccaaagcctgtgggtacttcctgaacctgcacaaagccaccggcaatccggtcctcgtgtacatggccgccggaaggttcgcccaggaggtggagaagctgtcggacaaggaagccgtcggcctggtcgtttctcacctgaagaagatgctcccggatgccactgaaccgacgcagtacctggtgtcgcgatggggctccgaccccaactccctggggtcctactcgtgcgacctggtcgcgaagccggccgacgtgtgcgcgaggttcgccgcccccgtcgagaacctgcacttcgccggcgaggcggccagtgccgagcactcggggtccgtgcacggcgcctactcgtcgggcatcgccgctgccgaggaatgcaggaagcggctcctggcgctgaagggcatcccggacctggtccaggtcgcggcgtgggaggagatggccggagctgtggctcctctgcagatttgcaggacctgagtgagattggatcactggctgcctttggacattggagtggatcgtggatcgcttcgctgctccctgatggttgccgagtctttttttttatatttaccttgaaggccgttgtgtcttgtctggaataaatcaagattgactggcactgaaagtgtcatcgcgtcactctttcatacttattaaatatcacaagtctgtcctgagatctcaaaaaaaaaaaaaaaaaaaaaaaaaaataaaaaaaaaaaaaaaaa

SEQ ID NO: 9546 - protein, 487 aa, Zea mays
  misc_feature: Ceres CLONE ID no. 1532647
  misc_feature: Ceres CDNA ID no. 35383450
  misc_feature (228)..(269): Pfam Name: DAO PFAM Desc: FAD dependent oxidoreductase
  misc_feature (25)..(69): Pfam Name: FAD_binding_2 PFAM Desc: FAD binding domain
  misc_feature: Homolog of GI Number: 18650598 NR Desc: At2g43020/MFL8.12
  misc_feature: Homolog of GI Number: 50929549 NR Desc: OSJNBa0043A12.39
  misc_feature: Homolog of GI Number: 50929551 NR Desc: OSJNBb0004A17.1
  misc_feature: Homolog of GI Number: 70663937 NR Desc: OSJNBb0004A17.1
  misc_feature: Homolog of GI Number: 25404949 NR Desc: protein F1E22.18
  misc_feature: Homolog of GI Number: 29468124 NR Desc: putative amine oxidase 1
  misc_feature: Homolog of GI Number: 21553762 NR Desc: putative amine oxidase
  misc_feature: Homolog of GI Number: 9368354 NR Desc: putative corticosteroid binding protein
  misc_feature: Homolog of GI Number: 56417713 NR Desc: OTTHUMP00000016077
  misc_feature: Homolog of GI Number: 74003942 NR Desc:  similar to amine oxidase
MDPNGLKTGGLLLPTIERRCTSPPSVIVIGGGISGVAAARALSNSSFKVTVLESRDRIGGRIHTDNSFGCPIDMGASWLHGVCNENPLAPLISYLGLRLYRTSDDNSVLYDHDLESYALFDKDGNQVPKETVDKVGETFERILEETVKVRDEQEHDMPLLQAISIVFERHPHLKLEGLDDQVLQWCVCRLEAWFAADADEISLKNWDQERVLTGGHGLMVNGYYPVIEALAQGLDIRLNQRVTEITRQHNGVKVTTEDGTSYLADACIISVPLGVLKANVIKFEPELPQWKSSAIADLGVGTENKIAMHFDRVFWPNVEVLGMVGPTPKACGYFLNLHKATGNPVLVYMAAGRFAQEVEKLSDKEAVGLVVSHLKKMLPDATEPTQYLVSRWGSDPNSLGSYSCDLVAKPADVCARFAAPVENLHFAGEAASAEHSGSVHGAYSSGIAAAEECRKRLLALKGIPDLVQVAAWEEMAGAVAPLQICRT

SEQ ID NO: 9547 - DNA, 721 bp, Zea mays
  misc_feature: Ceres CLONE ID no. 1532668
  misc_feature: Ceres CDNA ID no. 36706330
  CDS (159)..(458): REFERENCED BY SEQ ID NO: 9548
ctcttcaatacaaaaccagccgcagttctccattttcgagcgcagaagcgagagagatccggagcagccgcagtcccaccgaccccgccgccggtcgccctccatctcctcgccgctgcctctcgatctttgtacagtttctcttttcaataatcaagatgagccgtggtggtagtgccggtggtggtcaaagttctctgggttatctctttggaagcggtgagccccccaaaccagcagtggcaccagctgcaagtgctccacctgttgagaaaccatctgctgcaaagactgatgcggccaagcaggttgctgctggggttaccagccaaaccaataactaccacagggctgatggtcagaacactggcaacttccttacggaccgtccttcaaccaaggtccacgctgctcctggcggtggctcttccctgggctacctgttcggtggcaactgatgcccgtgctggtgcgctcaccaaagttatcctcccctgcctgctgcgtgctatgtctgaatcgtgaacaaccgttgtcatttcatgtgtgtaccccgtgcaatgctttgtgcgcatggttgatttctctgtggcaaacttcccgtcctgcatggggttgtaagctgtctctaaatttcacggcaagtcgtgtgcctgaaccttcatcttaagttgttgtcgtatcccttcgtcttgtttcggttgcaaaaaaaaaaaaaaaa

SEQ ID NO: 9548 - protein, 99 aa, Zea mays
  misc_feature: Ceres CLONE ID no. 1532668
  misc_feature: Ceres CDNA ID no. 36706330
  misc_feature: Homolog of GI Number: 21592628 NR Desc: putative nitrilase
  misc_feature: Homolog of GI Number: 2765837 NR Desc: NAP16kDa protein
  misc_feature: Homolog of GI Number: 21280823 NR Desc: putative nitrilase
  misc_feature: Homolog of GI Number: 21592782 NR Desc: nitrilase associated protein
  misc_feature: Homolog of GI Number: 28827480 NR Desc: putative nitrilase associated protein
MSRGGSAGGGQSSLGYLFGSGEPPKPAVAPAASAPPVEKPSAAKTDAAKQVAAGVTSQTNNYHRADGQNTGNFLTDRPSTKVHAAPGGGSSLGYLFGGN

SEQ ID NO: 9549 - DNA, 572 bp, Zea mays
  misc_feature: Ceres CLONE ID no. 1532889
  misc_feature: Ceres CDNA ID no. 25445779
  CDS (112)..(237): REFERENCED BY SEQ ID NO: 9550
aaaagtttcaacaacacctgctacttgagccaacaaacaacacacagcttgtcctcgccattgctcacttgggagcatccaatccaacccacaacacttcgtgactgcaatatgaagctgctcgctggaggccagaggaggaggcagaggggattcggcaaggccctcaaggagcagagggccaggctctacatcatccagagatgcgtcgtcatgctcctacgctggcacgactgaccaaccgctgggatccacgccatggggaagcttcatccaaggtcggacgagctccgatccatcgtgtcttcgcctgacgactcatcgggtgccgaagttttgggggggctcgtgctggtgccacaatggttgccggctgctgtacatagagggccagtatagtgtagtactccgacaaaaagaggtggtagcagtaggattcactctggtgttcgtcgtcagtgtctaccgtgtcattgtgtaaccacatcggtgtgatggaataccaaatcaatcaaacagagaacaaccaatggatcgctgacaaggccttcatctaaaaaaaaaaaaaaaaa

SEQ ID NO: 9550 - protein, 41 aa, Zea mays
  misc_feature: Ceres CLONE ID no. 1532889
  misc_feature: Ceres CDNA ID no. 25445779
  misc_feature (20)..(38): Pfam Name: DVL PFAM Desc: DVL family
MKLLAGGQRRRQRGFGKALKEQRARLYIIQRCVVMLLRWHD

SEQ ID NO: 9551 - DNA, 442 bp, Zea mays
  misc_feature: Ceres CLONE ID no. 1533075
  misc_feature: Ceres CDNA ID no. 35383451
  CDS (254)..(358): REFERENCED BY SEQ ID NO: 9552
aaaaatccaggcatggccttgcgcgtttccctcccctcatggcggcatcgacagcgcaatccctcgcgctcctcacgtctgcctcggcattgctcggcgtcgggctcgtggcggcatcggcgatgcgatcccttgcgttcctcgcatctgcctcgacatcgttcggcgtcgggcagcgggcgcaaggtatcattggaattcagtcttcagtttgacaaataacggcttagtagcaccagaaaaagagggggtcatgattccacagtctgtgcagtgtgctggttcagggacatggaaccaccaggcgattgttctggacagtttgaagactaaatatcttcagtcatgtatacaataatcttacagttagtgagataaatcaccacatggattttacatatcatagtgatatttgtcgttccgtttataaaaaaaaaaaaaa

SEQ ID NO: 9552 - protein, 69 aa, Zea mays
  misc_feature: Ceres CLONE ID no. 1533075
  misc_feature: Ceres CDNA ID no. 35383451
MALRVSLPSWRHRQRNPSRSSRLPRHCSASGSWRHRRCDPLRSSHLPRHRSASGSGRKVSLEFSLQFDK

SEQ ID NO: 9553 - DNA, 521 bp, Zea mays
  misc_feature: Ceres CLONE ID no. 1533295
  misc_feature: Ceres CDNA ID no. 36706892
  CDS (85)..(387): REFERENCED BY SEQ ID NO: 9554
aaagaccaccgacgcgtagcacagtccattattgccgtctcccttttgtgtgagcaaagaaagagagcgagaagagcagtcgccatgtctggcatcatccacaagatcgaggagaagctccacatggggggcgaccacaagaataaggaggaggagcaccacaagaaggccgaggagcaccacaagaaggaggagggggagcaccacaagaaggacggcggggagcacaaggaaggcatcgtggagaagatcaaggacaagatcaccggcgagcacggcgacaagtccggcgaccacaaggaaaagaaggacaagaaaaagaagaagcacggcgagggccacgaccacgacggcggccacagtagcagcagcagcgacagcgactgagatctggtgtcgcagcacaggtgcaacacatgtatgcttgctggatggaggattcataccagctgatgctgatgtagtgtttcactggtgtcatgcatgtatcgtgctattataatcaaaaaaaaaaaaaaaaa

SEQ ID NO: 9554 - protein, 100 aa, Zea mays; identical to SEQ ID NO: 9172
  misc_feature: Ceres CLONE ID no. 1533295
  misc_feature: Ceres CDNA ID no. 36706892
  misc_feature (2)..(100): Pfam Name: Dehydrin PFAM Desc: Dehydrin
  misc_feature: Homolog of GI Number: 50582768 NR Desc: putative dehydrin
  misc_feature: Homolog of GI Number: 2913893 NR Desc: LIP5
  misc_feature: Homolog of GI Number: 50812722 NR Desc: dehydrin 13
  misc_feature: Homolog of GI Number: 2331141 NR Desc: water
  misc_feature: Homolog of GI Number: 60459395 NR Desc: cold
  misc_feature: Homolog of GI Number: 7446584 NR Desc: cold stress protein SRC1
  misc_feature: Homolog of GI Number: 18478480 NR Desc: maturation
  misc_feature: Homolog of GI Number: 45790792 NR Desc: water stress induced protein
  misc_feature: Homolog of GI Number: 1657853 NR Desc: cold acclimation protein WCOR825
  misc_feature: Homolog of GI Number: 53748475 NR Desc: cold stress

SEQ ID NO: 9555 - DNA, 930 bp, Zea mays
  misc_feature: Ceres CLONE ID no. 1534641
  misc_feature: Ceres CDNA ID no. 40352024
  CDS (113)..(619): REFERENCED BY SEQ ID NO: 9556
agcacactcgcttgagcatcgtgtgctcttctcttcctcttccagttggtattctttatctgaaagactgaaacatagtacagaggaggagaggagagcgagagctaagaagatgaccggcaaggtcctgcttgtggccgtcctcttggtgggcgtggcctctcgatgctcgggcagtaggggcctgcagggcgatcacgttgctgaacagaagttcggtggcggcggcggcggcgggtacggaggcggtggcggctacacacccggctactctggcaccggcacctgcgactactggaagagccacccggacgccatcatctcgtgcatcgggtcgctgggcagcatcctcggctccttcggcgacgtgtgcagcgccttcttcgggagcaagctgcagacgctgcaggacgcgctgtgcaacacccgcaccgactgctacggcgacctgctccgcgagggcgccgcggcctacctcaactccatcgccgccgagaagtacgcctacagcacgcagcaggttcaggactgcatcgccgtcgcgctcacttccaaggccgccgccgtcgcgcaggccgccatgttcaagaaggccaactacgcctgcagctactactagacctcgcgcatcatcagcgcataatgttctttagataattccatacgtatatgggtgtgcaaggtccagaccgaccagctgtatgtcttcatcgttgccttcgtttctgcgtcgtcttcccatgcatgtttatgcatgatgccgtgccgtcgttgtcagctggttcagtagtgatgcttactttcttgtcgttgctgctgatgtaagaaataagacgatgcgttgactgcttaatttgcttgtgaaattctatagtcggtggtcttacgaaacgcacgggtactcagcccggctaaaaaaaaaaaaaaaaa

SEQ ID NO: 9556 - protein, 168 aa, Zea mays
  misc_feature: Ceres CLONE ID no. 1534641
  misc_feature: Ceres CDNA ID no. 40352024
MTGKVLLVAVLLVGVASRCSGSRGLQGDHVAEQKFGGGGGGGYGGGGGYTPGYSGTGTCDYWKSHPDAIISCIGSLGSILGSFGDVCSAFFGSKLQTLQDALCNTRTDCYGDLLREGAAAYLNSIAAEKYAYSTQQVQDCIAVALTSKAAAVAQAAMFKKANYACSYY

SEQ ID NO: 9557 - DNA, 1664 bp, Zea mays
  misc_feature: Ceres CLONE ID no. 1535299
  misc_feature: Ceres CDNA ID no. 25446782
  CDS (246)..(1313): REFERENCED BY SEQ ID NO: 9558
aatgtggccagcaccctcctccgctcaagagccaaagccaagtatgctagaacccgggcgcgctccaaattccccggtcacctacctcctctgccctctcactctcagatccgcgtcctcggctcctcctcctcctcccttccttcgttccttccagatctccctcccagtcgagagtcgagatccaccgcctccgcgccccctcaccggagcagcgcgaggaagcggggggccagaggccagccatgggcaaggaaggggccagcgacggcggcatgtcggagtcggtgatccgcaaggtcctggtctcgtacatgtacgtggcggtgtggatcttcctctccttctccgtgatcgtctacaacaagtacatcctcgaccccaagatgtacaactggcccttccccatctccctcaccatggtgcacatggccttctgctcctccctcgccgtggcgctcgtccgcgtcctccgcgtcgtcgacctcccgtcctcgcccgccatgacgtcgcagctctacgtctcctccgtgctccccatcggcgcgctctactcgctctcgctctggttctccaactccgcctacatctacctctccgtctccttcatccagatgctcaaggcgctcatgcccgtcgccgtctactccatcggggtcctcttcaagaaggagaccttcaagtcctccgccatgctcaacatgctctccatctcgttcggcgtcgccatcgccgcctacggagaggcccgcttcgacgcccgcggcgtcgccctgcagctcgccgccgtcgccttcgaggccacgcgcctcgtcctcatccagatcctcctcacctccaagggcatctccctcaaccccatcacctcgctctactacgtcgcgccctgctgcctcgccttcctcgtcgtgccctgggtcttcgtcgagctgcccaggctgcgcgccgtcggcagcttccagccggacctcttcgtcttcggcaccaactccctctgcgccttcgcgctcaacctcgccgtcttcctgctcgtcggcaagacgtcggctctcaccatgaacgtcgccggcgtcgtcaaggactggctgctcatcgccttctcctggtccgtcatccgcgacaccgtcacccccatcaacctcttcggctacgggatcgccttcctcggggtgggatactacaaccacgtcaagctgcaggcgctcaaggccaaggaggcgcagaagaaggcggcgcaggccgacgaggaggccgggtcgctgctgcaggagcgcgactcgcacggcgaccgcaagactgacaaccaggcctagcgagtgtgacggatctcatgatccaattcgctcggttctgaacccagccctctgcctagtgtgatccaaccccttacacgtttgatgcaaaatttgttcatttcttgtctttgacttgatctggtggtaccaaggaaataagcacgggaaagatgcaagctttgtgtcgaacatgtgaaaaaaaatatatgtatgagcaatttttgtctttttttgggccagttgtagctgttactaccattaaacagtaagcaaaactgtttgcattttatctgtatcgctgtgattggtcggttttgtcttgctaatacataaaaaattggacccactgggtcaaaaaaaaaaaaaaaa

SEQ ID NO: 9558 - protein, 355 aa, Zea mays
  misc_feature: Ceres CLONE ID no. 1535299
  misc_feature: Ceres CDNA ID no. 25446782
  misc_feature: Homolog of GI Number: 34908982 NR Desc: P0003D09.29
  misc_feature: Homolog of GI Number: 18420914 NR Desc: phosphate translocator
  misc_feature: Homolog of GI Number: 61651606 NR Desc: plastidic phosphate translocator
  misc_feature: Homolog of GI Number: 15810281 NR Desc: putative phosphate/phosphoenolpyruvate translocator protein
  misc_feature: Homolog of GI Number: 15221115 NR Desc: phosphate translocator
  misc_feature: Homolog of GI Number: 50901554 NR Desc: putative phosphoenolpyruvate/phosphate translocator
  misc_feature: Homolog of GI Number: 18481711 NR Desc: putative phosphate/phosphoenolpyruvate translocator
  misc_feature: Homolog of GI Number: 13592175 NR Desc: ppg3
  misc_feature: Homolog of GI Number: 11359723 NR Desc: proteophosphoglycan
  misc_feature: Homolog of GI Number: 915208 NR Desc: gastric mucin
MGKEGASDGGMSESVIRKVLVSYMYVAVWIFLSFSVIVYNKYILDPKMYNWPFPISLTMVHMAFCSSLAVALVRVLRVVDLPSSPAMTSQLYVSSVLPIGALYSLSLWFSNSAYIYLSVSFIQMLKALMPVAVYSIGVLFKKETFKSSAMLNMLSISFGVAIAAYGEARFDARGVALQLAAVAFEATRLVLIQILLTSKGISLNPITSLYYVAPCCLAFLVVPWVFVELPRLRAVGSFQPDLFVFGTNSLCAFALNLAVFLLVGKTSALTMNVAGVVKDWLLIAFSWSVIRDTVTPINLFGYGIAFLGVGYYNHVKLQALKAKEAQKKAAQADEEAGSLLQERDSHGDRKTDNQA

SEQ ID NO: 9559 - DNA, 521 bp, Zea mays
  misc_feature: Ceres CLONE ID no. 1535469
  misc_feature: Ceres CDNA ID no. 36706332
  CDS (113)..(496): REFERENCED BY SEQ ID NO: 9560
atcaaggaacagtgcaaactagaagaaacccccgtcatcagcgacctctccccaacggcgccgacgatggcgcaacagcagacgcagctaaccactggctcgggcatcctggatgccgtcccgctcttcgtcgtcatcctcctcgcggcccacgtcctggccctcgtgttctggatgtacaagctggcttccgagaagcaaccaccccggaggaagacacagtgacggcgccgatctacgccatcggcgatccttcgctagcctctttatcgctgcaattcctgggatcttgtccgcctcccccattcttccacggttccattttcatgtgaaccagtaccctccagaacattcaggccgtcaattattcagagatatccatatagtctttcaatttgttttatttatacttattgcattttgggtattgtttgataacaacttagcgatattctatgaatcactatccgtttgggtgataaataaatgttcctagttttagaccaaaaaaaaaaaaaaaa

SEQ ID NO: 9560 - protein, 52 aa, Zea mays; identical to SEQ ID NO: 1302
  misc_feature: Ceres CLONE ID no. 1535469
  misc_feature: Ceres CDNA ID no. 36706332

SEQ ID NO: 9561 - DNA, 3339 bp, Zea mays
  misc_feature: Ceres CLONE ID no. 1535952
  misc_feature: Ceres CDNA ID no. 40041452
  CDS (338)..(3037): REFERENCED BY SEQ ID NO: 9562
aattctttccgtctctgctctactttcttggtcgcctgtccggaggctcctccccgcggcccctgagcaaactgtaccatagccgcgtgattgattggttcacgggagggacagagagcggcgtcaagctagttttggtagtaaaaaatcacttcaattgtcccctcattcctatactaaagcaggctgcccaaaatttctcaatattgtcctcagaatttgttgctgtgcttttgccagaagcggtgcttgcttcggcagatggtcgttctcccgcacctgtcctaccgccgttgatcgcgagagtctcgtacgtagtcttcggggggaagcatccatggcggagtcatcgtcaaggcaagcggccgagatggtggagaagtggatggcgttcccgtctggctccgacgccggcagcggcttcgcgttcccggcgccacgctcagtgtcgggcgcgggcaaggagatagtggagctggcgtcgccctccacggccacggccagtgccggcaacaggcaggcctcgttccagcgcggccgcgacagtggcgtgggcagcaccaggtcgtccatggacggcgcgcgcgcgtcgggggactcgtcgatgccgcgggtgtcgcaggagctcaaggacgcgctgtccagcctgcagcagaccttcgtggtctccgacgccacccgcccggactgccccatcatctacgccagcgccggcttctacaccatgaccggctacacccccaaggaagtcaccggccgaaactgccgcttcctgcagggccccgacacggacatgaacgaggttgccaagatccgggacgccgttaaaaccggccgcagtttctgcggccgcttgctcaactaccgcaaggacggcacgcccttctggaacatgctcaccgtcacccccatccgcgacgacaacggcaaggtcatcaagttcatcgggatgcaagtcgaggtgagcaagtacacggaggggctgagcgaaaagcgcatgcggccaaacgagatgccagtgtccctcatccactacgacgaccggcagaaggagacggcaatgtcatcgatcacggaggtggtgcagacggtgaagcacccgcgcgctcgctccgagggtgaacaggagcccgtggagcctgcaccgcccgtcatggcgtcgccgttggtggcccctggcacgccgtcgggcggtgccagcctcaagtccccgctctgggacgtgaagaaggaggactcgcggctgagccggaagtcgagccgccgctcctccctcatggggttcaagatggggaagaggagctcgataggaagcaaggatgcccttccagcggaggtggaggccccggccccggcgccggcgccggcgccaccggagtcaacgacggagaagcagcgcaagaacagctgggagcaagaggggagggagagggacatcaggcaggggatcgatctagccacgacactagagcgtatcgagaagaacttcgtcatcacggatcccaggctccccgacaaccccatcatcttcgcgtcggatagcttcttggagctgacggagtacacgcgggaagagatcctcgggaggaattgcagatttcttcaagggccagagaccgacatgtccacagttgataagatccgggaagctatccgggaacagaaagaaatcactgtccagctaatcaactacaccaagagcgggaagaagttttggaacttgttccacctacagccaatgcgagaccagaaaggagagcttcaatacttcattggagttcaattggatggaagcgaccatgttgaaccccttaggaatcgtctctctgagaacactgaactacaaagtgctaaattggtcaaagctacggcagagaatgtggatgaagcagtcagagagcttcctgatcccaacctgagaccagaggatctatgggacatttactcacgatatgtttccccaaagcctcataaacgttacaactcttcttggattgcgatggaaaagattataaaatctggtgtgaagattggcttgaagcacttcaagcctataaaacctttgggttatggtgacactggcagtgtacatttggtggagttgcaaggaagcggtgaattatttgcaatgaaggcaatggacaaatcagtgatgttgaaccgcaacaaggttcatcgagcttgtatggaaagagaaatatactcactattggatcatccttttctcccaacattatatacttcattccagacaccaacacatgtttgtctcataacagacttttgtcctggaggagaattatttgcactactcgatatgcaaccaatgaaacttttcagagaagaatctgcaaggttttatgctgcagaggttgtaattggcctggagtatctccattgccttggaataatataccgtgacctaaagccagaaaacattttgctccaagaggatggccacatcgttctgactgattttgacctctcttttttgacttcctcaaaacctcatgtgataaagcattctacatcaaggcgaagaagatctaaggagtatctgcccccaagttttgtttcagatcctgccactccatcaaattcttttgttggaactgaagagtacatagctccagaggtcatcactggtgtaccacatacaagtgccattgattggtgggctcttggaattctcttgtatgaaatgttgtatggacgtacaccttttcgaggaaagaacaggaaaaggacatttcataatatcctgcacaaagaccttacatttccaagtagcattccggttagtcctgcggctaagcaattaatccatggattgctacagagagatccctcttctcgacttggttcaagtgctgctgcaaacgatatcaagcaacatcccttttttgaagatatacactggccactcatccgttgcatggagcccccagagcttgatgttccactgaaactaactcggaaggaacctgaacaaaaagtgaagcctgaggaggatatatactcatgttcagattattgagacattttaagggcaggttgtacgatcccccctcccgaccccgtgcatgactttcagcctgaagagattttatattaccgagtggaaataacgttgctgagcatgtacatagtaataaaagaggtttataggcatgcaagatttccagcctgaattgcacaagaggtcgttgtaagtcattcttttggttaggttaagtgaataatccatcaacaggataaagttcttgtaaatgtacactttctttggcatatataataaaaatcttactaatttccgttggtcaaaaaaaaaaaaaaaaa

SEQ ID NO: 9562 - protein, 899 aa, Zea mays
  misc_feature: Ceres CLONE ID no. 1535952
  misc_feature: Ceres CDNA ID no. 40041452
  misc_feature (570)..(856): Pfam Name: Pkinase PFAM Desc: Protein kinase domain
  misc_feature (95)..(209): Pfam Name: PAS PFAM Desc: PAS fold
  misc_feature: Homolog of GI Number: 2754823 NR Desc: NPH1
  misc_feature: Homolog of GI Number: 50922719 NR Desc: OSJNBa0079M09.13
  misc_feature: Homolog of GI Number: 79314333 NR Desc: PHOT1
  misc_feature: Homolog of GI Number: 19570333 NR Desc: PHY3
  misc_feature: Homolog of GI Number: 77548301 NR Desc: Protein kinase domain
  misc_feature: Homolog of GI Number: 77552776 NR Desc: Protein kinase domain
  misc_feature: Homolog of GI Number: 62361299 NR Desc: neochrome
  misc_feature: Homolog of GI Number: 73760090 NR Desc: neochrome
  misc_feature: Homolog of GI Number: 73760092 NR Desc: neochrome
  misc_feature: Homolog of GI Number: 5391442 NR Desc: non phototropic hypocotyl 1
MAESSSRQAAEMVEKWMAFPSGSDAGSGFAFPAPRSVSGAGKEIVELASPSTATASAGNRQASFQRGRDSGVGSTRSSMDGARASGDSSMPRVSQELKDALSSLQQTFVVSDATRPDCPIIYASAGFYTMTGYTPKEVTGRNCRFLQGPDTDMNEVAKIRDAVKTGRSFCGRLLNYRKDGTPFWNMLTVTPIRDDNGKVIKFIGMQVEVSKYTEGLSEKRMRPNEMPVSLIHYDDRQKETAMSSITEVVQTVKHPRARSEGEQEPVEPAPPVMASPLVAPGTPSGGASLKSPLWDVKKEDSRLSRKSSRRSSLMGFKMGKRSSIGSKDALPAEVEAPAPAPAPAPPESTTEKQRKNSWEQEGRERDIRQGIDLATTLERIEKNFVITDPRLPDNPIIFASDSFLELTEYTREEILGRNCRFLQGPETDMSTVDKIREAIREQKEITVQLINYTKSGKKFWNLFHLQPMRDQKGELQYFIGVQLDGSDHVEPLRNRLSENTELQSAKLVKATAENVDEAVRELPDPNLRPEDLWDIYSRYVSPKPHKRYNSSWIAMEKIIKSGVKIGLKHFKPIKPLGYGDTGSVHLVELQGSGELFAMKAMDKSVMLNRNKVHRACMEREIYSLLDHPFLPTLYTSFQTPTHVCLITDFCPGGELFALLDMQPMKLFREESARFYAAEVVIGLEYLHCLGIIYRDLKPENILLQEDGHIVLTDFDLSFLTSSKPHVIKHSTSRRRRSKEYLPPSFVSDPATPSNSFVGTEEYIAPEVITGVPHTSAIDWWALGILLYEMLYGRTPFRGKNRKRTFHNILHKDLTFPSSIPVSPAAKQLIHGLLQRDPSSRLGSSAAANDIKQHPFFEDIHWPLIRCMEPPELDVPLKLTRKEPEQKVKPEEDIYSCSDY

SEQ ID NO: 9563 - DNA, 1346 bp, Zea mays
  misc_feature: Ceres CLONE ID no. 1535959
  misc_feature: Ceres CDNA ID no. 25445488
  CDS (110)..(985): REFERENCED BY SEQ ID NO: 9564
aaagccaaaaggcactgaagaagccagtcaatagcgagttctactactagtagctagcctgctgatctgttctgttgtttagttcgcaaagccttctgtttcggcgaccatggaggatgagaggaacacccagcagcaccagggcggtgaggcccagcaggacgccgccgatcaggtggacgtgaaggatagggggctcctggacagccttctcggcaggaagaagcacgacgacgaccaggagaagaagaagcagacggatgagctggcgaccggcatggagaaggtcacggtgtccgagcccgagaagcacgggcacaaggaggaggagcacgaggtcgtcggcgagaagaaggagggccttctcgccaagctgcaccgcaccagttccagctccagctcgtcgagcgacgaggaagaggaggcgatcgatgagaacggcgagattatcaagaggaagaagaagaagatgggcctcaaggagaagctcaaggagaagctgccgggccacaaggacggccaccacacggccgcaccgtccccggcgcccgcgcccgtggagacgcatgcccaccaccaggaggaagcgcacaggccgcacgtcgtcccgaccccggccccgccgcctccaccgcacgtccaccagcacgaccacggcgtcgtcgtccaggacgacgtgaagaccgggaccccgccgcatgcaccggaggaggagaagaaaggcctgctggacaagatcaaggagaagctccccggtggccacaacaagaagcctgaagccgctgccgctgccgcaccggctccgcccgtccacgcgccggcgccggcgccgcaggcggagaacgtgagcagcccggatggcaagaagaagaagggcggcttgctgggcaagatcatggacaagatacccggctaccacaagagctcagctgaggaagcagaccacaaggcggacgccgccggcgagcacaggaccagctcctaaggtcgcagtcgcagcgcgtgtcctggccgtggccgggccttgggcgatcagaaggtagctagcgttggcatgtgggttcggttctggtttgcttttaccaaaagtttgtttcaaggtggatcgcctggtcaaggtccgtgtgctttttaaggtggatcgcgtgactggcagtgagtgttgctgcttgtgtaggacgtggtacgtacgggttttattttggttccaagtcaaaagtcacggtcggtctggatgttgtgtactgggtttgttgaattatgagcagctgcgcgttgtaattcggctgggctacctggatgcgttaataattgctttggtttctgcctaaaaaaaaaaaaaaaaa

SEQ ID NO: 9564 - protein, 291 aa, Zea mays
  misc_feature: Ceres CLONE ID no. 1535959
  misc_feature: Ceres CDNA ID no. 25445488
  misc_feature (25)..(159): Pfam Name: Dehydrin PFAM Desc: Dehydrin
  misc_feature: Homolog of GI Number: 532623 NR Desc: dehydrin
  misc_feature: Homolog of GI Number: 55274278 NR Desc: SK3
  misc_feature: Homolog of GI Number: 7489664 NR Desc: cold acclimation protein WCOR410b
  misc_feature: Homolog of GI Number: 1084470 NR Desc: cold acclimation protein
  misc_feature: Homolog of GI Number: 1657845 NR Desc: cold acclimation protein WCOR410c
  misc_feature: Homolog of GI Number: 4105115 NR Desc: dehydrin 8
  misc_feature: Homolog of GI Number: 61657606 NR Desc: dehydrin
  misc_feature: Homolog of GI Number: 642246 NR Desc: paf93
  misc_feature: Homolog of GI Number: 6017942 NR Desc: dehydrin
  misc_feature: Homolog of GI Number: 50252145 NR Desc: putative LIP9
MEDERNTQQHQGGEAQQDAADQVDVKDRGLLDSLLGRKKHDDDQEKKKQTDELATGMEKVTVSEPEKHGHKEEEHEVVGEKKEGLLAKLHRTSSSSSSSSDEEEEAIDENGEIIKRKKKKMGLKEKLKEKLPGHKDGHHTAAPSPAPAPVETHAHHQEEAHRPHVVPTPAPPPPPHVHQHDHGVVVQDDVKTGTPPHAPEEEKKGLLDKIKEKLPGGHNKKPEAAAAAAPAPPVHAPAPAPQAENVSSPDGKKKKGGLLGKIMDKIPGYHKSSAEEADHKADAAGEHRTSS

SEQ ID NO: 9565 - DNA, 1423 bp, Zea mays
  misc_feature: Ceres CLONE ID no. 1536618
  misc_feature: Ceres CDNA ID no. 35383452
  CDS (56)..(1069): REFERENCED BY SEQ ID NO: 9566
agcaccaccaccgtcactcaacacagcacaggcagctcgagagagagagagaaagatgtcgtggttcgggcaccaccaccacaaccagccggctcccccggcgtcgggccccaaccaggtgttcaagatcttctgccgcgccaacgagaactactgcctggccgtccgcgacggcgccgtcgtgctggccccggtcaaccccaaggacgaccaccagcactggtacaaggacatgcgcttcagcacccgggtcaaggacgaggaaggcatgccggcgttcgcgctcgtcaacaaggccacggggctcgccatcaagcactccctcggccagtcccacccggtcaagctcgcgcctttcagcccggaccaggaggacgcgtcggtgctgtggacggagagcaaggacgtgggcaagggcttccgctgcatccgcatggtcaacaacacccgcctcaacttcgacgccttccacggcgacaaggaccacggcggcgtgcacgacggcaccgccgtcgtgctctgggagtggtgcaagggcgagaaccagagctggaagatcctgccgtggggtcccgaggccaactccgccgcggcccacgcgggaggcccgcacgccgtgcgcgtcttctgcaaggccggcggcgaggactacagcctcacggtgcgcaacggcacggcgtgcctggcgcccaccaacccgcgggacgagtaccagcactggttcaaggacatgcgccacagcacccgggtgcgggacgaggagggctacccggccttcgcgctcgtcaacaaggtcaccggcgaggcgctcaagcactccacggggcagggccaccccgtcaagctcgtgccctacaacccggactaccaggacgagtccgtgctctggaccgagagccgcgacgtcggcaacggcttccgctgcgtccgcatggtcaacaacatctacctcaacttcgacgccttccacggcgacaaggcccacggcggcgtccatgacggtaccgagatcgtgctctggaagtggtgcgagggcgacaaccagcgctggaagatcctcccttggtgaacgaacgaaagaaactactagctggtaccctaataataattctgctggctgcggcgatccccaaataaaagaggcagggtgcgatgcatcgcggtcttctcgactctcgagtggtgtttgcgttagacagccagccactgtgtggctagtgttccaacatttgtcagcctgcttgcgcgaggaagtgggggtgactgactcaagagaagggcctggtcataggctgctgcattatgaatttctgatcatgtcttatgtctgtactctgaatcaactatgtatgagatctcatctcctttctcctactgaatgaatgaatcattattggcttgcaaagaaaaaaaaaaaaaaaaa

SEQ ID NO: 9566 - protein, 337 aa, Zea mays
  misc_feature: Ceres CLONE ID no. 1536618
  misc_feature: Ceres CDNA ID no. 35383452
  misc_feature (311)..(332): Pfam Name: Ricin_B_lectin PFAM Desc: Ricin
  misc_feature: Homolog of GI Number: 34902150 NR Desc: Putative r40c1 protein
  misc_feature: Homolog of GI Number: 1296955 NR Desc: osr40c1
  misc_feature: Homolog of GI Number: 1658313 NR Desc: osr40g2
  misc_feature: Homolog of GI Number: 50940089 NR Desc: putative r40c2 protein
  misc_feature: Homolog of GI Number: 50940087 NR Desc: r40g2 protein
  misc_feature: Homolog of GI Number: 50940085 NR Desc: putative r40c1 protein
  misc_feature: Homolog of GI Number: 50940091 NR Desc: r40g3 protein
  misc_feature: Homolog of GI Number: 66277464 NR Desc: stress responsive protein
  misc_feature: Homolog of GI Number: 56283929 NR Desc: CG3047
  misc_feature: Homolog of GI Number: 72547023 NR Desc: proteophosphoglycan ppg4
  misc_feature: Useful for making plants with increased biomass
  misc_feature: Useful for sterility
MSWFGHHHHNQPAPPASGPNQVFKIFCRANENYCLAVRDGAVVLAPVNPKDDHQHWYKDMRFSTRVKDEEGMPAFALVNKATGLAIKHSLGQSHPVKLAPFSPDQEDASVLWTESKDVGKGFRCIRMVNNTRLNFDAFHGDKDHGGVHDGTAVVLWEWCKGENQSWKILPWGPEANSAAAHAGGPHAVRVFCKAGGEDYSLTVRNGTACLAPTNPRDEYQHWFKDMRHSTRVRDEEGYPAFALVNKVTGEALKHSTGQGHPVKLVPYNPDYQDESVLWTESRDVGNGFRCVRMVNNIYLNFDAFHGDKAHGGVHDGTEIVLWKWCEGDNQRWKILPW

SEQ ID NO: 9567 - DNA, 1147 bp, Zea mays
  misc_feature: Ceres CLONE ID no. 1536903
  misc_feature: Ceres CDNA ID no. 25446203
  CDS (236)..(967): REFERENCED BY SEQ ID NO: 9568
aggtcgattcgacgaactacattgttccctctttcctctcctctttccccatccgtccaatcaaccgggctgctctgctgcctctccggcgccattgacgagcaagataatcctcatcctccgacacctggtccgtcgcgtgccgtgcccacccgctaaggccagggcgccccgactcgagctcaccgcgtcgaactcgaaccgctgctgttcctcgggggcagggtcgtcgaggatgccggagcactcagagaacgcggcggcggacctgatgggcaacatcatggagaccattgcggagaacctcccgaggcagaagtccgtgcggttcgacgacggcgacggctcctccatctccgagcaggccaagaagctgttcggcggcggcgagagcaggaagaagtcggtccaccacgtgctgggcggcggcaaatccgccgacgtgctgctgtggcggaacaagaagatctcgtccagcgtgctgggcgtggcgacgctggtgtgggtgttcttcgagtggctggactaccacttcctcaccatcctctgcttcatgctcgcgctcggcatggccgtccagttcgcctggtccatcttctcgtccagcgtgcctcgcgtgcagctgccggaggagctgttcgcgagcgccggcgcggccgccggcgcccaggtgaacagggcgctgggcttcctccaggacgtggcctgcggacgcgacctcaagcggctggtcatcgtgatcgccgggttcttcgcggcggcggtcgtcggcagcttctgcaacctcctgacggtcatctacatcgggttcgtgtgcgcgcacaccctgccggtgctgtacgagaggtaccaggaccaggtggacgagttcctgtacaacatgctagggctggtgcagagccagtacagcaagctggacagcaagggcatcctcaaggggggcgtcaagttcaggaagagcgactagctgatttcctcccatctacgactacgatttgattcatcctgggagtcttgatcgatcgacacttgttctgttctgtacagcgagtaacaaccgctgctgctagctacattctttactgtactgtacttgtgtgatgacatcatatcttcgcgtcgcgtgtactgaaaaaaaaaaaaaaaa

SEQ ID NO: 9568 - protein, 243 aa, Zea mays
  misc_feature: Ceres CLONE ID no. 1536903
  misc_feature: Ceres CDNA ID no. 25446203
  misc_feature (67)..(230): Pfam Name: Reticulon PFAM Desc: Reticulon
  misc_feature: Homolog of GI Number: 30681227 NR Desc: reticulon family protein
  misc_feature: Homolog of GI Number: 34904202 NR Desc: P0492F05.25
  misc_feature: Homolog of GI Number: 34909318 NR Desc: OSJNBb0021A09.5
  misc_feature: Homolog of GI Number: 83284001 NR Desc: putative 24 kDa seed maturation protein
  misc_feature: Homolog of GI Number: 52076447 NR Desc: putative 24 kDa seed maturation protein
  misc_feature: Homolog of GI Number: 58381567 NR Desc: ENSANGP00000001657
  misc_feature: Homolog of GI Number: 56784958 NR Desc: 24 kDa seed maturation protein
  misc_feature: Homolog of GI Number: 41410200 NR Desc: EchA3
  misc_feature: Useful for sterility
MPEHSENAAADLMGNIMETIAENLPRQKSVRFDDGDGSSISEQAKKLFGGGESRKKSVHHVLGGGKSADVLLWRNKKISSSVLGVATLVWVFFEWLDYHFLTILCFMLALGMAVQFAWSIFSSSVPRVQLPEELFASAGAAAGAQVNRALGFLQDVACGRDLKRLVIVIAGFFAAAVVGSFCNLLTVIYIGFVCAHTLPVLYERYQDQVDEFLYNMLGLVQSQYSKLDSKGILKGGVKFRKSD

SEQ ID NO: 9569 - DNA, 450 bp, Zea mays
  misc_feature: Ceres CLONE ID no. 1536971
  misc_feature: Ceres CDNA ID no. 36707128
  CDS (69)..(239): REFERENCED BY SEQ ID NO: 9570
aatctttttcttcctcgcgccgccgccgccgtgacggaaggaagaggaggagcaaggagcacgacgcgatgggtcactccaacgtttggaactcgcaccctaagaactacggccctggctcccgcgtctgccgggtctgcgcgaaccctcacggtctgatcaggaagtacgggctcatgtgctgcaggcagtgcttccgcagcaacgccaaggacattggtttcatcaagtaccgttgaagaggccactgtgctgctgtggagaacttcctacatcaaagaaatgggtccttcattagaaggcctaatttatgcgctttagctttttgttcagaacttgagactcatgtgttaaactcgacttgttaaagttttgatggctactttgtgcttgttggaccagctataatcagaagattgaaattttctcacacaaaaaaaaaaaaaaaaa

SEQ ID NO: 9570 - protein, 56 aa, Zea mays; identical to SEQ ID NO: 454
  misc_feature: Ceres CLONE ID no. 1536971
  misc_feature: Ceres CDNA ID no. 36707128
  misc_feature (3)..(56): Pfam Name: Ribosomal_S14 PFAM Desc: Ribosomal protein S14p/S29e
  misc_feature: Homolog of GI Number: 31745220 NR Desc: putative ribosomal protein S29
  misc_feature: Homolog of GI Number: 77555907 NR Desc: ribosomal protein S14p/S29e
  misc_feature: Homolog of GI Number: 57471722 NR Desc: ribosomal protein S29
  misc_feature: Homolog of GI Number: 13194826 NR Desc: putative ribosomal S29 protein
  misc_feature: Homolog of GI Number: 51970282 NR Desc: ribosomal S29 subunit
  misc_feature: Homolog of GI Number: 51971827 NR Desc: ribosomal S29 subunit
  misc_feature: Homolog of GI Number: 61654760 NR Desc: S29
  misc_feature: Homolog of GI Number: 47026945 NR Desc: ribosomal protein S29
  misc_feature: Homolog of GI Number: 32400973 NR Desc: ribosome protein S29

SEQ ID NO: 9571 - DNA, 517 bp, Zea mays
  misc_feature: Ceres CLONE ID no. 1537256
  misc_feature: Ceres CDNA ID no. 35383453
  CDS (22)..(312): REFERENCED BY SEQ ID NO: 9572
aaaggcagggggagaggggaaatggcatcgttgtcccgcaccgctgctgccgctgtcgtggccctgaggtcggcggtccgctccgcgccccttaccggccgcgtcctcggagcgccactaccttcctttgcctcgccttccgctacccgctccgcccggatcctccgcaggtcggcggccgcggcgtcggcggggctggaaacgctaatgccgctgcacagtgcggtggctgccgcgcggcttaggtcctgcatcgccgtcgactcctcctgctggtgctcgctctcacaaggatatgctttgcctttatgacagcgaggcgagctgcacatgaagaaacaaaagaatcttaggaattacaaacaagggctgtactgtaataatgtggttcttgtaaaccaattttgccttagaattctgtaacttgaatcatccacagatgtgcgactgtcttttgtttatgtggatctatgaattacctgcagctcctcgtttgaactaaaaaaaaaaaaaaaaa

SEQ ID NO: 9572 - protein, 96 aa, Zea mays
  misc_feature: Ceres CLONE ID no. 1537256
  misc_feature: Ceres CDNA ID no. 35383453
  misc_feature: Homolog of GI Number: 34913910 NR Desc: OSJNBa0024F24.29
MASLSRTAAAAVVALRSAVRSAPLTGRVLGAPLPSFASPSATRSARILRRSAAAASAGLETLMPLHSAVAAARLRSCIAVDSSCWCSLSQGYALPL

SEQ ID NO: 9573 - DNA, 3051 bp, Zea mays
  misc_feature: Ceres CLONE ID no. 1537475
  misc_feature: Ceres CDNA ID no. 40041453
  CDS (349)..(2931): REFERENCED BY SEQ ID NO: 9574
aatcgtacctcactccccctctctaccgccgccattcacctaccaacaagtgcgtgtgtagtgagaaagaaaccttattggctagctcgccggccggcagcttcaccatccaatacagcgaggagcaagctctgctctccgaacccggccacccatggctctcgacctcgtcgtcctcctcctcctgcccatcttccttctctcatcgtcttcctgcctcgtcctcgccattccaacgctagccagccaggctgccaccctgctctccctcaaggactctttctcgcctccgctcccgccgcagctgcgcagctggaccctcgccaactatgcctcgctctgctcctcatggcccggcgtcgcctgcagcaaccgcaccgtcgtctcgctcgacatctccggctacaacctctccggcacgctgccccccgctatcgccgacctcgctggcctccgtttcttctccgccacctcgacctcggcgggaacttcttctccggcaccattcctcccagcttcggccgcttccccgccatccagttcctctccctcgccggcaacagcctctccggggacatcccgcccgacctcgccaacctctccacgctgcgccacctcttcctcggctacttcaaccgcttcgacggcggcatcccggcggagctcggcaggctcaccagcctcgtccacctcgacctcgccaactgcggcctgcagggccccatcccggcctcgctcggcgacctcaccgggctggacacgctctacctgcagacgaaccagctgaacggcaccatcccgccgtcgctgggcaacctcaccggccttaggttcctcgacgtctccaacaacgcgctcacgggggagatccctcccgagctcgccgcgctcagggaactcaggctgctcaacatgttcatcaaccggttccgcggcggcgtcccggacttcctgggcgacctccgctccctgcaggtcctcaagctgtggcagaacaacttcacgggcgccatccccgcggcgctcggccgcgccgcgccgctccgggaggtggacctgtccacgaaccggctgacgggggaggtgccccgctggctgtgcgcgcgcgggcagctggagatcctcatcctcctcgacaacttcctcttcgggccggtgccggaggggctgggcgcctgcccgacgctcacgcgggtgaggctgggccagaactacctcacggggccgctcccgcgcggcttcctctacctgccggcgctcaccaccgtggagctgcagggcaactacctgacgggacggctggaggaggacggcagcggcagcagcaggctgtcgctgctgaacctgtcgagcaaccgcttcaacggatcgctgccggcatccatgggcaacttctcgtggctgcagacgctcctcctcggtggcaaccagctgggcgggcagatcccgcggcaggtcgggcgcctgaagcggctgctgaagctggacctgagcggaaacaagctgacgggggcggtgcccggcgaggtgggcgagtgcacgtcgctgacgtacctggacctgagcggcaaccgtctgtccggcgcgatccccgtgcggctggtgcagatcaaggtgctcaactacttgaacgtgtcgtggaacatgctgagcggcagcatcccgcgggagctgggcggcatgaagagcctgaccgccgccgacttctcgcacaacgagctgtccgggcgcgtgccggagagcgggcagttcgcctacttgaacgggtcgtcgttcgtgggcaacccggggctggtggtggtgaatccgaagcagcaggtgatgggaggagggccggggatcctcggcggcgcggggacgcaggatgaacgtggctcttcttcgtcgtcggcggtgatggggcgcctgaagctgctgcttgcggcggtgggcctccttgggttctccgtggcgttcgcggcggctgccgtggcgacgacgcgttccgccgccatgctccggcggcggcgtcggtcttcgtcgtggcggtggcgcatgacggcgttccagcaggtgtctttcgggtgcgaggacgtggtgcggtgcgtgaaggagaactgcgtggtggggcgcggcggggccggggtggtgtaccgcgggacgatgcccggcggggagtgcgtggcggtgaagcggatcgtgtcggcggagggcggcgggttccaggcggaggtggagacgctgggtgggatccggcaccggcacatcgtgcggctgctggccttctgctcggggcccgaggcgaagctgctggtgtacgagtacatggtgaacggcagcctcggggaggcgctgcaccgcgctgatgatggcggcggcggtgtggtgctgtcgtgggcgtcgcgtctccgcgtggcgacggaggctgccaaggggctgtgctacctgcaccacgactgctcgccgccgatcctgcaccgggacgtcaagtccaacaacatcctgctggacgcgcgcatggaggcccacgtggcggacttcgggctggccaagttcctgggcggcagcggcgcctccgagtgcatgtccgccgtcgcaggatcatacggctacatcgcaccagagtacgcgtacacgctcaaggtggacgagaagagtgacgtgtacagcttcggcgtggtcctgctggagctcatcacggggctgaagccggtgggggagcacctcggcgacgacgcggtggacctggtgcagtgggcgcgcgcccggagctctgcagggggcggcgtcctggcgctgctggaccctcgcctcggcggcgacgtcccggtggcggaggcggcgcatgtgctgttcgtgtcgatgctatgcgtgcaggagcacagcgtggagcgccccaccatgcgcgaggtcgtccagatgctgcagcaggcacggcaccagcctagctaggacgacgaccggagaaacgatgtgaaaatgtgatagatagacagaggtggtgttgtgtacgttgtcattgcattcggtaactatatatatatatatttttagcaaaaaaaaaaaaaaaaa

SEQ ID NO: 9574 - protein, 860 aa, Zea mays
  misc_feature: Ceres CLONE ID no. 1537475
  misc_feature: Ceres CDNA ID no. 40041453
  misc_feature (38)..(61): Pfam Name: LRR_1 PFAM Desc: Leucine Rich Repeat
  misc_feature (832)..(852): Pfam Name: Pkinase_Tyr PFAM Desc: Protein tyrosine kinase
  misc_feature: Homolog of GI Number: 79330883 NR Desc: ATP binding / protein serine/threonine kinase
  misc_feature: Homolog of GI Number: 31711782 NR Desc: At1g28440
  misc_feature: Homolog of GI Number: 31711786 NR Desc: At5g65700
  misc_feature: Homolog of GI Number: 15222877 NR Desc: CLAVATA1 receptor kinase
  misc_feature: Homolog of GI Number: 2160756 NR Desc: CLV1 receptor kinase
  misc_feature: Homolog of GI Number: 7268822 NR Desc: CLV1 receptor kinase like protein
  misc_feature: Homolog of GI Number: 50899498 NR Desc: CLV1 receptor kinase
  misc_feature: Homolog of GI Number: 31540632 NR Desc: CLV1
  misc_feature: Homolog of GI Number: 58372544 NR Desc: CLV1
  misc_feature: Homolog of GI Number: 9802553 NR Desc: F22O13.7
MARRRLQQPHRRLARHLRLQPLRHAAPRYRRPRWPPFLLRHLDLGGNFFSGTIPPSFGRFPAIQFLSLAGNSLSGDIPPDLANLSTLRHLFLGYFNRFDGGIPAELGRLTSLVHLDLANCGLQGPIPASLGDLTGLDTLYLQTNQLNGTIPPSLGNLTGLRFLDVSNNALTGEIPPELAALRELRLLNMFINRFRGGVPDFLGDLRSLQVLKLWQNNFTGAIPAALGRAAPLREVDLSTNRLTGEVPRWLCARGQLEILILLDNFLFGPVPEGLGACPTLTRVRLGQNYLTGPLPRGFLYLPALTTVELQGNYLTGRLEEDGSGSSRLSLLNLSSNRFNGSLPASMGNFSWLQTLLLGGNQLGGQIPRQVGRLKRLLKLDLSGNKLTGAVPGEVGECTSLTYLDLSGNRLSGAIPVRLVQIKVLNYLNVSWNMLSGSIPRELGGMKSLTAADFSHNELSGRVPESGQFAYLNGSSFVGNPGLVVVNPKQQVMGGGPGILGGAGTQDERGSSSSSAVMGRLKLLLAAVGLLGFSVAFAAAAVATTRSAAMLRRRRRSSSWRWRMTAFQQVSFGCEDVVRCVKENCVVGRGGAGVVYRGTMPGGECVAVKRIVSAEGGGFQAEVETLGGIRHRHIVRLLAFCSGPEAKLLVYEYMVNGSLGEALHRADDGGGGVVLSWASRLRVATEAAKGLCYLHHDCSPPILHRDVKSNNILLDARMEAHVADFGLAKFLGGSGASECMSAVAGSYGYIAPEYAYTLKVDEKSDVYSFGVVLLELITGLKPVGEHLGDDAVDLVQWARARSSAGGGVLALLDPRLGGDVPVAEAAHVLFVSMLCVQEHSVERPTMREVVQMLQQARHQPS

SEQ ID NO: 9575 - DNA, 902 bp, Zea mays
  misc_feature: Ceres CLONE ID no. 1538541
  misc_feature: Ceres CDNA ID no. 25446204
  CDS (137)..(691): REFERENCED BY SEQ ID NO: 9576
aatctcgccctcgctcacctacatctccgtccgcaagcgtcagccaggctgccccgggaggccgggaggaagcagatcggagaaggcaagccacggatttccttctcgccttctggaccccatgtgatctgttgtaatggctcgattgtacatcggcaacctggatccccgggtgaccgctcgggagctggaggacgagttccgcacgttcggggttcttcgcagtgtctgggttgctcggaaaccacctggctttgcgtttattgattttgatgataagagggacgcagaggatgcaatccgtgacctagatggcaagaatggatggagagttgagttatctcgtaatgccagcggtggtcgtggaggtcgtgaccggcatggtgggtctgagtccaagtgttacgagtgtggtgagactggccactttgctcgtgagtgccgtttgaggattggttctggaggtctaggcagcggaaggcgccgaagccgtagccgtagccgcagtcgcagtcccagatatcgccggagtccaagttacggtagaaggagttacagtcctgcagcacgctctccaaggcgtcgtagcgtctcaccagctcgtggacgcagctatagcaggtcaccacagcacaagggtgcacgtgaagaatctccctatgataatggataccgccgcagcaggagctagagccagatcgttgtatccgacgacgagcgttatgtgacagatattgggaaagctatggtcaataacctgcttgacagatccttcgtcgactgcttgactttggttaaggttctcataactttctatatacctattatcttgtgtctactttataagtagcagtaaaaccttttgatgagtgtatttgttgaactaaaaaaaaaaaaaaaaa

SEQ ID NO: 9576 - protein, 184 aa, Zea mays
  misc_feature: Ceres CLONE ID no. 1538541
  misc_feature: Ceres CDNA ID no. 25446204
  misc_feature (4)..(70): Pfam Name: RRM_1 PFAM Desc: RNA recognition motif.
  misc_feature (87)..(104): Pfam Name: zf PFAM Desc: Zinc knuckle
  misc_feature: Homolog of GI Number: 51091721 NR Desc: putative splicing factor
  misc_feature: Homolog of GI Number: 50915458 NR Desc: putative Splicing factor
  misc_feature: Homolog of GI Number: 51979265 NR Desc: PREDICTED OJ1476_F05.20 gene product
  misc_feature: Homolog of GI Number: 21436285 NR Desc: putative RSZp22 splicing factor
  misc_feature: Homolog of GI Number: 28950713 NR Desc: At2g24590
  misc_feature: Homolog of GI Number: 2582645 NR Desc: RSZp22 protein
  misc_feature: Homolog of GI Number: 3435096 NR Desc: SRZ21
  misc_feature: Homolog of GI Number: 25294317 NR Desc: protein T23E23.2
  misc_feature: Homolog of GI Number: 2582643 NR Desc: RSZp21 protein
  misc_feature: Homolog of GI Number: 72167806 NR Desc:  similar to splicing factor
  misc_feature: Useful for delaying flowering time
  misc_feature: Useful for increasing chlorophyll and photosynthetic capacity
  misc_feature: Useful for making plants with increased biomass and foliage
  misc_feature: Useful for making smaller plants
MARLYIGNLDPRVTARELEDEFRTFGVLRSVWVARKPPGFAFIDFDDKRDAEDAIRDLDGKNGWRVELSRNASGGRGGRDRHGGSESKCYECGETGHFARECRLRIGSGGLGSGRRRSRSRSRSRSPRYRRSPSYGRRSYSPAARSPRRRSVSPARGRSYSRSPQHKGAREESPYDNGYRRSRS

SEQ ID NO: 9577 - DNA, 1157 bp, Zea mays
  misc_feature: Ceres CLONE ID no. 1539169
  misc_feature: Ceres CDNA ID no. 25447018
  CDS (123)..(383): REFERENCED BY SEQ ID NO: 9578
aatctccagccgtcgttcacgccgctcaccacgagccttgcttcttcacgtcacctccttctcacacattttccctctcacctctcaatccatggacaccctccctgctctgatcccccccgatgctcgccgtgggtgccgtttgctgccccaacgccgttccgcgccccctccactccggccatgagctcctcccagtgaatccctctagtcccctgctcatctcccatggtggccgcagggagctctggatccatggccgtcggcctctgggcgtgagcagcccttggctctctcccctgcgacagacttcctccacggtgtctctttccccaaccatggtggccggctccctgctcctccattcggtgcccctggtttagggccggtcgacctccggcgacctcctccccatggcacagcaggccgacgcccctgcctctactccatcttccccattggacagcacgagctcctcctcgccgatacgccagcaaccctgcagcagcgccactcgatctcctctatacgtgaacaacagcaacccggatcccatccacgtcgtatgcgtcgatccgatctgtgcagtcccaacccacgacgtcgcaacacccttgccctccgtcgatgtcacgcttcgctcatcgctcctcgacgaagagccataaccgtggtagacatgcatgcgcgatccgaactgatttcatcaggtatgttaattgatcacgtgctatggaagacgagtggaattgatctccaagtgatgctgatggacgaagctaaaatggatgaatcaaccaagtgccaggatggaagatgctcaccaagtggtcgtcaattaacaacactaacgtagtgtttatcccaggttgtaattttgttctgttgtggatggtgctaagtgccggtgggctcggccttcttatataagtatatcccatctttagcttccctattgaggattgtcacttaagctagcatgtattttaaaacttataaatgttttatacattcaaattgtaatctttttgaatcaatttcttttgtaatcacctccgatgatatatattgtaatcttgttataacttgtaaatgttgtaacttgtaatcattttgtaataaagaatttatttccgctgcgtaaaaaaaaaaaaaaa

SEQ ID NO: 9578 - protein, 84 aa, Zea mays
  misc_feature: Ceres CLONE ID no. 1539169
  misc_feature: Ceres CDNA ID no. 25447018
MAQQADAPASTPSSPLDSTSSSSPIRQQPCSSATRSPLYVNNSNPDPIHVVCVDPICAVPTHDVATPLPSVDVTLRSSLLDEEP

SEQ ID NO: 9579 - DNA, 1422 bp, Zea mays
  misc_feature: Ceres CLONE ID no. 1539172
  misc_feature: Ceres CDNA ID no. 25446205
  CDS (115)..(999): REFERENCED BY SEQ ID NO: 9580
aaccaaacaaacactcgagctaagctcagcctcacacagcctctcgtctcgagctagagtgctacactgctactagcttagaagaagaagcagcttacagctgaagctgcagcaatggcgaaatcttacaccttactgttcgtcgcactggtcgttatggcccttctagtgagccccattgcttgctcccgcaagctcgccaagccgaacaagcccaagccgacccacaagccggcggccagggtcacgcccggcggcaaccacaccagtatccccgcagtgtccgccgcctacggctccggcggctggttgtctgccggcgcgacgtactacggcgccccaaacggcgacggcagtgacggcggtgcgtgcgggtaccagaccgccgtcgggcagcgccccttctcgtcgatgatcgccgccggcagcccgtctctgttcaagggaggcaagggctgcggcgcctgctacgaggttaaatgcgacagcaacccggcatgctccggccagccggccaccgtggtcatcaccgacgagtgccccggcggtgtctgcctcgcagaggcggctcacttcgacatgagcggcacctccatgggcgccatggcgaagcccggcatggccgacaggcttcgcgccgccggcatcctcaagatccagtacaagagggtgccgtgcaagtacagcggcgtgaacatcgccttccgggtggaccagggatccaacccgttctacttggaggtgctcatcgagttcgaggacggcgacggcgacctcagcgccgtccagctcatggaggccgggtgcggcacgtggaccccgatggtgcacaactggggcgcgctctggcgctacaactccaacaccggcaaggcgctgaaggcgcccttctcgctccggctgacctccgactccggcagggtgctcgtcgccaacaacgtcatccccgccggctggaaccccggagccacgtaccgctccttggtgaactactcctgattgatgaactgcggcggcggcggttcggttctccgccccccattgcatgcgcttggctggattattatgcgtggccaagaagtgctttccagggtgcgtggtgttcaaagaacgagtctcgagtttgttttctgagaagaagaagaaaatgtatgttcgggtgtccgcgagaggcggtgtaagaagaggaggaggacgagaaggttaaggagccgtgcgttcttcactccctccacggtctctgcagtcacctagtgatgtgtgtagtggtcggtgtcggtttcttttttcgttgtgatggctcaggacaggagttgggcgttgtatcagtctgtgtgtgtgcgcgcgcgcgcgtagttttctgtaccacgcaatcctttcagagaattgaaatcctgctttcttgtaaaaaaaaaaaaaaaa

SEQ ID NO: 9580 - protein, 294 aa, Zea mays
  misc_feature: Ceres CLONE ID no. 1539172
  misc_feature: Ceres CDNA ID no. 25446205
  misc_feature (101)..(183): Pfam Name: DPBB_1 PFAM Desc: Rare lipoprotein A
  misc_feature (195)..(278): Pfam Name: Pollen_allerg_1 PFAM Desc: Pollen allergen
  misc_feature: Homolog of GI Number: 16517013 NR Desc: beta
  misc_feature: Homolog of GI Number: 50911475 NR Desc: putative beta
  misc_feature: Homolog of GI Number: 14193767 NR Desc: beta
  misc_feature: Homolog of GI Number: 40363749 NR Desc: putative beta
  misc_feature: Homolog of GI Number: 44894810 NR Desc: expansin EXPB9
  misc_feature: Homolog of GI Number: 50927813 NR Desc: OSJNBa0010H02.8
  misc_feature: Homolog of GI Number: 8118428 NR Desc: beta
  misc_feature: Homolog of GI Number: 50911473 NR Desc: putative beta
  misc_feature: Homolog of GI Number: 55168110 NR Desc: putative beta
  misc_feature: Homolog of GI Number: 50927811 NR Desc: OSJNBa0010H02.7
  misc_feature: Useful for making plants with increased biomass
MAKSYTLLFVALVVMALLVSPIACSRKLAKPNKPKPTHKPAARVTPGGNHTSIPAVSAAYGSGGWLSAGATYYGAPNGDGSDGGACGYQTAVGQRPFSSMIAAGSPSLFKGGKGCGACYEVKCDSNPACSGQPATVVITDECPGGVCLAEAAHFDMSGTSMGAMAKPGMADRLRAAGILKIQYKRVPCKYSGVNIAFRVDQGSNPFYLEVLIEFEDGDGDLSAVQLMEAGCGTWTPMVHNWGALWRYNSNTGKALKAPFSLRLTSDSGRVLVANNVIPAGWNPGATYRSLVNYS

SEQ ID NO: 9581 - DNA, 1021 bp, Zea mays
  misc_feature: Ceres CLONE ID no. 1539180
  misc_feature: Ceres CDNA ID no. 25445906
  CDS (2)..(622): REFERENCED BY SEQ ID NO: 9582
aatgccacaacaagacccagaacccacaatctttctttgtgcacagaaagaagaaagaacctatggcacagtcgtcgtccgcctccgtcaagctgctggttctggttgtcctccctgcgctcctcctgttcctcgtccaagcgcaaggtatataacacagcttctatgctgctgcgattcttccggccgcatggtggtggcggtggctgtggcggttgttgacccacatggcacggcggcggtgtggtgcgtgtgcaggggctcggccagcggcggcgaacacgacgaccccgacccccgccaccaccaccgggtgcgcggcgtcgagcgtgacggtgtcgcagtccaacacgggcgacagggccgggtacgacccggtgttcggggtgacggtgagcaacgcctgccgctgcgccgtccgcgccgtgcgcctccgctccgagggcttcgccagctcggtgcccgtggacccgcgcctgttccgccgcgccggccgcgactacctcgtcgccgacggccgccggatcgagcccggcgccgacgcgcgcttccgctacgcctgggaccgcgccttccggatgaccgccgccgccgtgcgcgacgactgctcctgatggagtgagtgagtgcggtagctcctgcctgcaacgagtgaattgcagtagctcctgtccttcgtgagagagagagactcgctctgtcgtgatccacagggaatttacctcggttttacgcttgtttattagcgcttcttcttaacgtattggctagttcgctggatcatacttcgaataaaaaaactccctctgccgcccgaacaaacaaaaaagtatgtttttttttcagtatcgtaaacaaagtcaatggttcacagtactgtctgtcctgcgtcgtagacattgatgctcctcttcttaactgtttaaacttgttgtaatgagctttcactgtacgttaataacaaacagtactggggccggccgatggcatgttgtgctcggtagcaaaaaaaaaaaaaaaa

SEQ ID NO: 9582 - protein, 143 aa, Zea mays
  misc_feature: Ceres CLONE ID no. 1539180
  misc_feature: Ceres CDNA ID no. 25445906
  misc_feature: Homolog of GI Number: 77551191 NR Desc: LGC1
  misc_feature: Homolog of GI Number: 52076874 NR Desc: putative phytocyanin protein
MVVAVAVAVVDPHGTAAVWCVCRGSASGGEHDDPDPRHHHRVRGVERDGVAVQHGRQGRVRPGVRGDGEQRLPLRRPRRAPPLRGLRQLGARGPAPVPPRRPRLPRRRRPPDRARRRRALPLRLGPRLPDDRRRRARRLLLME

SEQ ID NO: 9583 - DNA, 964 bp, Zea mays
  misc_feature: Ceres CLONE ID no. 1539312
  misc_feature: Ceres CDNA ID no. 25446769
  CDS (17)..(721): REFERENCED BY SEQ ID NO: 9584
aagggacaggagagagatggacgcggagaagcagcgccagcacgacggcgcggtggaggcggacatcgagcggctccccgtcgacctcctcgcgcacatcctctccctcctgtcgcccttccgcgacctgtccatggcggagggagtgagccggaggtggcgctgggcggtggagcggtcgctggcgtcgcggcggcggctgagcttcgcgggccagcgcaccggcgacgacaccgccgcgcgcctcgtccgcgccgccgtcaacctccgcgacctcgacatctgctggggctgccgaatcaccgacgatggcctgatcaagatttcgtccgcggattgcgtcggcaacctgacgtccatatcgctctggggattggccgggatcaccgataagggcgtggtccgtctggtttcgagggcttattctctgcagcacctcaatatcggtggaacgttcatcacagatgaatccctctacgcagtcgcaaacagctgcgcaaatcttaagagcatcatcctgtggagctgccgccacgtgacggagggcgggctggtggcgctggtgaacaagtgccggcggctggagtgcatcaacgtgggcgggatgcgggtgccgccggagagcttggtgggcctgctctccatcagccccgccctagagatcaggtccaccgcacgcatcctcaacctcaacctcaacgccggggtgcaggtctcctgatccatgtgcactggatttccccatggaaaaaagaatcgtcagaagggactcactcaccaccaggatcatcatacgtgtgtgtgttcgtgttcgtgttggcatattgtttgttgttaaaaaaaaacagatacgtcatcgtgattctatatatctcctgtacatgttacacacaataaaccataaaatgaactgtacggccaccgtgcctgcagacatatctcagacgcaaaaaaaaaaaaaaaa

SEQ ID NO: 9584 - protein, 234 aa, Zea mays
  misc_feature: Ceres CLONE ID no. 1539312
  misc_feature: Ceres CDNA ID no. 25446769
  misc_feature (17)..(49): Pfam Name: F PFAM Desc: F
  misc_feature: Homolog of GI Number: 55741376 NR Desc: F
  misc_feature: Homolog of GI Number: 34907434 NR Desc: P0018C10.44
  misc_feature: Homolog of GI Number: 53981728 NR Desc: unknow protein
  misc_feature: Homolog of GI Number: 21554029 NR Desc: F
  misc_feature: Homolog of GI Number: 72107742 NR Desc:  similar to F
  misc_feature: Homolog of GI Number: 50906051 NR Desc: putative F
  misc_feature: Homolog of GI Number: 57085861 NR Desc:  similar to F
  misc_feature: Homolog of GI Number: 6164721 NR Desc: F
  misc_feature: Homolog of GI Number: 50906053 NR Desc: putative F
MDAEKQRQHDGAVEADIERLPVDLLAHILSLLSPFRDLSMAEGVSRRWRWAVERSLASRRRLSFAGQRTGDDTAARLVRAAVNLRDLDICWGCRITDDGLIKISSADCVGNLTSISLWGLAGITDKGVVRLVSRAYSLQHLNIGGTFITDESLYAVANSCANLKSIILWSCRHVTEGGLVALVNKCRRLECINVGGMRVPPESLVGLLSISPALEIRSTARILNLNLNAGVQVS

SEQ ID NO: 9585 - DNA, 956 bp, Zea mays
  misc_feature: Ceres CLONE ID no. 1539361
  misc_feature: Ceres CDNA ID no. 25447078
  CDS (3)..(560): REFERENCED BY SEQ ID NO: 9586
aacgcccccacatctctctctctctctccagcgcactcttcctcccctcactatccacctcagcctcagcgaaggcatcatcgacccatggagttgtacgaggacgagaagtggaagttctccaagaagagccggaacaacggcagccggcgcgtcccgggggccggagccggtggtggcggggactctctgctgaagagatcgtccagcatgagagacgccccggcgatcggccgcggcgggagcggcgccggcgcggccggggcgggcgggtgcgcggcgcagcagccgccgtcgttctcgagccggtgcgcggggctggtgaaggagcagcgggcgcgcttctacatcatgcgccgctgcgtgaccatgctcgtctgctggaaggaccgctcgtagccgcggctagcttccagggccggccgccggcgaagaagctgggcccctcgtcctcccatcgttgtttctccgtccgtccgccaggatcggagagtcggtcacggggctggacgctgaagcaagccgagggagggacacggggaagaaggcagattaggtgatgtgtgtatagctcagtctttggttaggacgagtgctcccttcccttttttttttttttttgacctcccatttctgggacgttttcttggttaccggtgctcgattaggtaagagtagtgattagtacagtacttagcgctgcgaggtagatgtggaatcgtggacagttttgggatctcccttcttttgaaggggaatggggatcagggttcttttacagctgcagtgctgcaactgcaaaggagcaccgcaggcagctggatgaaatctagtggatcttctgttgtgccacgaccacggtggggggtaaaaaaggaggaggatgtcgctgcccatgtatagctaaagaaaccagacgcaacagcatgctaagttcaaagaaaaaaaaaaaaaaa

SEQ ID NO: 9586 - protein, 103 aa, Zea mays
  misc_feature: Ceres CLONE ID no. 1539361
  misc_feature: Ceres CDNA ID no. 25447078
  misc_feature (80)..(98): Pfam Name: DVL PFAM Desc: DVL family
  misc_feature: Homolog of GI Number: 42822049 NR Desc: TPA: DVL8
  misc_feature: Homolog of GI Number: 34906022 NR Desc: P0518C01.24
MELYEDEKWKFSKKSRNNGSRRVPGAGAGGGGDSLLKRSSSMRDAPAIGRGGSGAGAAGAGGCAAQQPPSFSSRCAGLVKEQRARFYIMRRCVTMLVCWKDRS

SEQ ID NO: 9587 - DNA, 897 bp, Zea mays
  misc_feature: Ceres CLONE ID no. 1539550
  misc_feature: Ceres CDNA ID no. 40352025
  CDS (643)..(810): REFERENCED BY SEQ ID NO: 9588
agtggcccgtgggcgccgtgagagggaaagggcaggcttcctagggtttgtggcggggcggcagctgcagctggaatgccggcgacacatccccttttccggccagttgcacactgggatctaatacaatggctagcgatggtgatgcttcaccttcacggaagcgtatgttgttggagttgccttgtgatgaagaaggtgcaaatgtgagccaaaatgttggtgtgtccgcatcatcagccacgacccacacctgccgctgccagagcttctcatgaacaaggtgaaaatctagaaggtggaagtaatgttgatggggatgattcttcaaaggaaaagcaatcaaagaagtccacttcagatgtttagcagtaacatttgtgctagctgttaaggggtatccattgcaatgggaggagtttcaaaaatgtgctactgaatgtggtgtggacacaaaggttggactctctattgatgttgctactaggtgtaattcaacatattgcatgttgagggatgcactacataacaaggctgcctttgaaaggcttatgtcatatgaacgtcacaggatgaagacctagatgatgatcatgatgatggacgtgaggcatcgttgtaagcttgttgatgatgacctagatgatgataatgcgacatgaatgctttgaatgtttcttactgtacttattgccaacttgggacttgttatattgtgaacttgtgatcaactttttatgttgtgaacttgtgatctttgtggtcaacttgttatattgtgatctttgtggtcaacttgttatattgtgaacttgtaatctgtgtgatcaacttgttatattatgaacttatgatctcaatgatcaacttgttatattgtgaaaaaaaaaaaaaaaa

SEQ ID NO: 9588 - protein, 50 aa, Zea mays
  misc_feature: Ceres CLONE ID no. 1539550
  misc_feature: Ceres CDNA ID no. 40352025
MLVCPHHQPRPTPAAARASHEQGENLEGGSNVDGDDSSKEKQSKKSTSDV

SEQ ID NO: 9589 - DNA, 931 bp, Zea mays
  misc_feature: Ceres CLONE ID no. 1539811
  misc_feature: Ceres CDNA ID no. 40352026
  CDS (68)..(730): REFERENCED BY SEQ ID NO: 9590
aagacgcaccccttcctcgtttcgccgcctccgccgacaccgactgcctacctcagctgccgtcgccatgggcagaaggcctgctagatgctatcgccagatcaagaacaagccataccctaagtccaggtactgccgtggtgtccctgaccccaagatcaggatctacgatgtcgggatgaagaggaagggtgttgatgagttcccctactgtgtgcaccttgtctcttgggagaaggagaatgtctccagtgaggcgctcgaggctgcccgcattgcctgcaacaagtacatgaccaagtctgcaggaaaggatgccttccaccttagggtccgggttcacccgttccatgtcctccgtatcaacaagatgctttcgtgtgctggggctgataggctccagactggaatgaggggtgcctttggcaagcctcagggcacctgtgctagggtggacattggtcaggtcctcctttccgtgcgatgcaaggacaacaatgctgcacatgccagcgaagctctgcgtcgcgctaagttcaagttccctggccgccaaaagatcattgagagcagaaagtggggcttcaccaagttcagccgcgctgactacctgaagtacaagagcgagggtagaattgttcctgatggtgtcaacgcaaagctgctcggcaaccacggcagacttgagaagcgtgctcctgggaaggctttcctcgatgccgttgcttaagtgcggatgcgaatcctgacgttttgctttagcgtatcttactttgcttcgtggaacatgaatttcaagtgttttgagggtattacagtgccttatgtgaacttgcctatcttgtgctgaacatcggaatctatcctccgagtatgtttaatcgcattaattttatttgaaatgggttgcgcaacaaaaaaaaaaaaaaaa

SEQ ID NO: 9590 - protein, 220 aa, Zea mays
  misc_feature: Ceres CLONE ID no. 1539811
  misc_feature: Ceres CDNA ID no. 40352026
  misc_feature (1)..(176): Pfam Name: Ribosomal_L10e PFAM Desc: Ribosomal L10
MGRRPARCYRQIKNKPYPKSRYCRGVPDPKIRIYDVGMKRKGVDEFPYCVHLVSWEKENVSSEALEAARIACNKYMTKSAGKDAFHLRVRVHPFHVLRINKMLSCAGADRLQTGMRGAFGKPQGTCARVDIGQVLLSVRCKDNNAAHASEALRRAKFKFPGRQKIIESRKWGFTKFSRADYLKYKSEGRIVPDGVNAKLLGNHGRLEKRAPGKAFLDAVA

SEQ ID NO: 9591 - DNA, 1115 bp, Zea mays
  misc_feature: Ceres CLONE ID no. 1540056
  misc_feature: Ceres CDNA ID no. 25401778
  CDS (140)..(808): REFERENCED BY SEQ ID NO: 9592
aacgcttaatcgcttcgcttccgccctccatcgatcacctccaaagatcgagagcggctcgctcgtcaagcgctccatcgagccgtcggtgcaggagccaaatcatatatatataggcggacaggaggaagacccgccgatgggtcaccaccgcggcggctgccgctgcgagctctgcggcgcgcccgcggccgtgcactgcgcggcggacgcggccttcctctgcgccgcctgcgacgccaaggtgcacggcgccaacttcctcgcgtcgcgccaccgccgcacgcgcctcctcctcgcggcgccggacgagtgcgggtacgagtccggggcgagctcctgcgtgtccacggcggtcgactctgcggcgccgccgccgcggcggacccgcgggggcggcagcccgggcccgcgctcgcgcggcgaggcggtgctcgaggcgtgggccaggcggacgggcctgacggcggcggacgcgcgccggcgcgccgcggcggcggcgcgggcgctccgggcccacgcccacggcctcgcctccgcgcgcgtcgcgccgcgcgtcgccatggccgccgcgctgtggcgggaggtggcggggcgcggcgggaccggcggcggcggccacggccacggcgaggcgctgcggcggctggaggcgtgcgcgcacgtgccggcggggctcgtggtggcggtggccaagtccatggcgcgcgcgcgcgggcggggggacgaggccgacacggacgccgcggcggagggctgggacgagtgcgcctgggccgggcccaagtccagcccgccacgtccttgatcttttctcgtgctcgctgatgaaatgaagaacgaaaccgaacgaatgggaggacacagacttcgggatttgtggaccttgtttgttttgcgcaaggcccaacaaaacttgtggttttagaataggagacacagcatatattaaagtattgattagacttgtgagctaatgtggctccaaatgcggtgcccgggtgcccacaatgttcgctaaactgcaattatccgcatcactattacatgatatatatctagacataaatctaaagaagataaagcatcttatacttcaaaaaaaaaaaaaaaaa

SEQ ID NO: 9592 - protein, 222 aa, Zea mays
  misc_feature: Ceres CLONE ID no. 1540056
  misc_feature: Ceres CDNA ID no. 25401778
  misc_feature (7)..(51): Pfam Name: zf PFAM Desc: B
  misc_feature: Homolog of GI Number: 66776103 NR Desc: LigA
  misc_feature: Homolog of GI Number: 66776365 NR Desc: PE
  misc_feature: Homolog of GI Number: 66780099 NR Desc: PE
  misc_feature: Homolog of GI Number: 66779656 NR Desc: Insulinase
  misc_feature: Homolog of GI Number: 66778899 NR Desc: UvrD/REP helicase
  misc_feature: Homolog of GI Number: 66775827 NR Desc: OsmC
  misc_feature: Homolog of GI Number: 66777991 NR Desc: TPR repeat
  misc_feature: Homolog of GI Number: 66776813 NR Desc: Phosphoribosylaminoimidazole
  misc_feature: Homolog of GI Number: 66779508 NR Desc: Aspartate/glutamate/uridylate kinase
MGHHRGGCRCELCGAPAAVHCAADAAFLCAACDAKVHGANFLASRHRRTRLLLAAPDECGYESGASSCVSTAVDSAAPPPRRTRGGGSPGPRSRGEAVLEAWARRTGLTAADARRRAAAAARALRAHAHGLASARVAPRVAMAAALWREVAGRGGTGGGGHGHGEALRRLEACAHVPAGLVVAVAKSMARARGRGDEADTDAAAEGWDECAWAGPKSSPPRP

SEQ ID NO: 9593 - DNA, 980 bp, Zea mays
  misc_feature: Ceres CLONE ID no. 1540502
  misc_feature: Ceres CDNA ID no. 36592332
  CDS (112)..(717): REFERENCED BY SEQ ID NO: 9594
aatctatccaaccagaacccagcgcatcatcgcagcagcggcggcaactcgtcggagcaagcaaagctagcaccttccttctccttcgcacgacaagctcgatcgaccgacatggccgagaggacgaacgcgatggcggcgccacggccgctcctgcgccggatgctctcgttccgggagccgctcctggtcatcccgtacttgctcagcttcctgggcgccgcggcctcggcgctggcgcgcagccactcgtcgctgctgcactcgctcgccagggcgctgttcccggccgcgcctgccgccgccaacgccaagcacgcgccgccgcccgccgctgccgctgccgccgcgccgcccccggacggcgaggacgccgcgctgagcaaggcggaggtggaggccatcatggccacgatcggcctcgcggcggccgggaaaggcgagggcctcgcggccgccataggccgcgacgaggtgtccgcgctcttcgacgccgacgagcccagcttcgccgaggtgcggggcgcctttgccgtcttcgacgccgaccgcgacggcttcatcggcgccgaggacctgcagggcgccctggcgcggctcggcgtcaggcaggacgccgccgcgtgccgcgccatggtcgtcgcggccggcggcggccgggacgcccggatgagcctgttccagttcgtcaggttcctcgagaacggcctgtgctgaagccacagagggggcagagaagctgtcccttcattttttttcttcttcttcgttcttcttcgtttgcctcggctgctcgtggcaggagatgagacagtgcaccattcggagaggtgttcactggctggcgcgcgtgtgtttttccctcctgccatgagctttgggggtggactcaactgtgcagcaattaacgcactaattcccaaactaagaactactatgatttaatggaactaatttgccggttgcaaaaaaaaaaaaaa

SEQ ID NO: 9594 - protein, 201 aa, Zea mays
  misc_feature: Ceres CLONE ID no. 1540502
  misc_feature: Ceres CDNA ID no. 36592332
  misc_feature (135)..(163): Pfam Name: efhand PFAM Desc: EF hand
  misc_feature: Homolog of GI Number: 71368905 NR Desc: similar to ATPase involved in DNA repair
  misc_feature: Homolog of GI Number: 20466131 NR Desc: AT5g39670/MIJ24_140
  misc_feature: Homolog of GI Number: 67988031 NR Desc: ROK
  misc_feature: Homolog of GI Number: 66776103 NR Desc: LigA
  misc_feature: Homolog of GI Number: 66778899 NR Desc: UvrD/REP helicase
  misc_feature: Homolog of GI Number: 66778264 NR Desc: LigA
  misc_feature: Homolog of GI Number: 67985765 NR Desc: Pantoate
  misc_feature: Homolog of GI Number: 67987371 NR Desc: Aldehyde dehydrogenase
  misc_feature: Homolog of GI Number: 67984658 NR Desc: type II secretion system protein E
  misc_feature: Homolog of GI Number: 66776881 NR Desc: similar to ABC
MAERTNAMAAPRPLLRRMLSFREPLLVIPYLLSFLGAAASALARSHSSLLHSLARALFPAAPAAANAKHAPPPAAAAAAAPPPDGEDAALSKAEVEAIMATIGLAAAGKGEGLAAAIGRDEVSALFDADEPSFAEVRGAFAVFDADRDGFIGAEDLQGALARLGVRQDAAACRAMVVAAGGGRDARMSLFQFVRFLENGLC

SEQ ID NO: 9595 - DNA, 595 bp, Zea mays
  misc_feature: Ceres CLONE ID no. 1540599
  misc_feature: Ceres CDNA ID no. 40352027
  CDS (100)..(339): REFERENCED BY SEQ ID NO: 9596
accatctagccatcagatcaaacaatccccaaacgcctccgcctccgcctccctagggttttgctctcggctcgtcggatccagttcgggggatcctccatggcgtcgcgtccgtcgctgaagtcgaagcccaagggcaagggcgggaagaaggccaccgccgacgacgaggacgccaccgcggcggcgaccacggtgcggctcatgaaggagtggaccacgtggacgatgaagaaggcgaaggtggtggcgcactacggcttcatccccctcgtcatcgtcatcggcatgaactccgagcccaagccctccgtgttccagctcctctcccccgtctgatcggatctccccgtcagggcccggatgaggtcggtccgtagtagtttgtagctggtacttcatttgcttacatatgtccgagatcgagttgaagaaggtggatcatgctttctgggcgaatttgaaggatttggtttaataattttgtagtggcggatgtcttctatacatcggatcaaaaatgtcttggttatgtgatctgcagtgcttatgattgtatgaactatatccgttttcgccaaaaaaaaaaaaaaaa

SEQ ID NO: 9596 - protein, 79 aa, Zea mays; identical to SEQ ID NO: 4764
  misc_feature: Ceres CLONE ID no. 1540599
  misc_feature: Ceres CDNA ID no. 40352027
  misc_feature (37)..(76): Pfam Name: Tom7 PFAM Desc: TOM7 family

SEQ ID NO: 9597 - DNA, 522 bp, Zea mays
  misc_feature: Ceres CLONE ID no. 1541062
  misc_feature: Ceres CDNA ID no. 35383454
  CDS (13)..(342): REFERENCED BY SEQ ID NO: 9598
aaaacgccagccatggcggcggctcagtcctccaccgattcgatggctccgcacctccgccgccgccctcgccgcctcgtcttcgaccgccgctacggctggatctttgacgaatggacgcgccccgccgaccaagccctctccggcggacgcggaatgttctgtgcgctgacgatggcgcggtcgctggtgagcgctgcggcgtgctcgattaactatgctgccagttcaatcagcagagttctggaacgccccaaaagactccacaagaagcagcaagcctggttccgtgaacttgaatgctcgggagttgtagctgatcttaagttaatacagacttgaagccattctgaactagaatgcaccacaactggttgcatgtgttccgtaaagaagcatgatcatctgtaagcacggtatcagaaaattatgagacacttatccttagcaaaaagctatttgtcctgtttctactctaatgtggcaatgatggcacatttatttcaaaaaaaaaaaaaaaaa

SEQ ID NO: 9598 - protein, 109 aa, Zea mays; identical to SEQ ID NO: 8896
  misc_feature: Ceres CLONE ID no. 1541062
  misc_feature: Ceres CDNA ID no. 35383454

SEQ ID NO: 9599 - DNA, 1827 bp, Zea mays
  misc_feature: Ceres CLONE ID no. 1541955
  misc_feature: Ceres CDNA ID no. 25891468
  CDS (84)..(1637): REFERENCED BY SEQ ID NO: 9600
aacaaccaccaactcgcgatccatcgatttgattgcagaacaccacccaacagccaaaccatcactaggcgtctacgcttgacatggataaggcctacatcgccgcgctctccgccgccgccctcttcttgctccactacctcctgggccgccgcgccggcggcgagggcaagaccaagggctcgcagcggcggctcccgccgagccctccggcgatcccgttcctgggccacctccacctcgtcaaggccccgttccacgcggcgctggcccgcctcgcggcgcgccacggcccggtgttctccatgcgcctggggacccggcgcgccgtggtcgtgtcgtcgccggactgcgccagggagtgcttcacggagcacgacgtgaacttcgcgaaccggccgctgttcccgtcgatgcggctggcgtccttcgacggcgccatgctctccgtgtccagctacggcccgtactggcgcaacctgcgccgcgtcgccgccgtgcagctcctctccgcgcaccgcgtcgcgtgcatggcccccgccatcgaagcgcaggtgcgcgccatggtgcggaggatggaccgcgctgccgcggccggcggcggcggcgccgcgcgcgtccagctcaagcggcggctgttcgagctctccctcagcgtgctcatggagaccatcgcgcacaccaagacgtcccgcgccgaggccgacgccgactcggacatgtcgcccgaggcccacgagttcaagcagatcgtcgacgagctcgtgccgtacatcggcacggccaaccgctgggactacctgccggtgctgcgctggttcgacgtgttcggcgtgaggaacaagatcctcgacgccgtgggcagaagggacgcgttcctgaggcggctcatcgacggggagcggcggaggctggacgctggcgacgacagcgaaagtaagagcatgattgcggtgctgctcactttgcagaagtccgagccagaggtctacactgacactgtgatcactgctctttgcgcgaacctattcggcgccggaacggagaccacgtccaccacgacggaatgggccatgtcgctgctgctgaaccaccgggaggccctcaagaaggcgcaggccgagatcgacgcggcggtgggcacctcccgcctggtgaccgcggacgacgtgccccacctcacctacctgcagtgcatcgtcgacgagacgctgcgcctgcaccccgccgcgccgctgctgctgccgcacgagtccgccgcggactgcacggtcggcggctacgacgtgccgcgcggcacgatgctgctggtcaacgtgcacgcggtccacagggaccccgcggtgtgggacgacccggacaggttcgtgccggagcggttcgagggcggcaaggccgaggggcgcctgctgatgccgttcgggatggggcggcgcaagtgccccggggagacgctcgcgctgcggaccgtcgggctggtgctcggcacgctgctccagtgcttcgactgggacacggttgatggagctcaggttgacatgaaggctagcggcgggctgaccatgccccgggccgtcccgttggaggccatgtgcaggccgcgtacagctatgcgtgatgttcttaagaggctctgaaaacctcatggatcgaattgctggcatcggctgaagggtgtatgactatgacgtagcttccaagttccgagcatatatattcgtattgtgggttgccttgtactagttgattttcgccgagtgtatggaatggattttcttttttttttcttgcaatggatgtgaattttgctaaaaaaaaaaaaaaaaa

SEQ ID NO: 9600 - protein, 517 aa, Zea mays
  misc_feature: Ceres CLONE ID no. 1541955
  misc_feature: Ceres CDNA ID no. 25891468
  misc_feature (39)..(502): Pfam Name: p450 PFAM Desc: Cytochrome P450
  misc_feature: Homolog of GI Number: 50199401 NR Desc: P450
  misc_feature: Homolog of GI Number: 50199403 NR Desc: P450
  misc_feature: Homolog of GI Number: 50199405 NR Desc: P450
  misc_feature: Homolog of GI Number: 13661744 NR Desc: putative cytochrome P450
  misc_feature: Homolog of GI Number: 13661746 NR Desc: putative cytochrome P450
  misc_feature: Homolog of GI Number: 13661748 NR Desc: putative cytochrome P450
  misc_feature: Homolog of GI Number: 50918907 NR Desc: putative cytochrome P450
  misc_feature: Homolog of GI Number: 50918909 NR Desc: putative cytochrome P450
  misc_feature: Homolog of GI Number: 50918911 NR Desc: putative cytochrome P450
  misc_feature: Homolog of GI Number: 50918905 NR Desc: putative cytochrome P450
MDKAYIAALSAAALFLLHYLLGRRAGGEGKTKGSQRRLPPSPPAIPFLGHLHLVKAPFHAALARLAARHGPVFSMRLGTRRAVVVSSPDCARECFTEHDVNFANRPLFPSMRLASFDGAMLSVSSYGPYWRNLRRVAAVQLLSAHRVACMAPAIEAQVRAMVRRMDRAAAAGGGGAARVQLKRRLFELSLSVLMETIAHTKTSRAEADADSDMSPEAHEFKQIVDELVPYIGTANRWDYLPVLRWFDVFGVRNKILDAVGRRDAFLRRLIDGERRRLDAGDDSESKSMIAVLLTLQKSEPEVYTDTVITALCANLFGAGTETTSTTTEWAMSLLLNHREALKKAQAEIDAAVGTSRLVTADDVPHLTYLQCIVDETLRLHPAAPLLLPHESAADCTVGGYDVPRGTMLLVNVHAVHRDPAVWDDPDRFVPERFEGGKAEGRLLMPFGMGRRKCPGETLALRTVGLVLGTLLQCFDWDTVDGAQVDMKASGGLTMPRAVPLEAMCRPRTAMRDVLKRL

SEQ ID NO: 9601 - DNA, 982 bp, Zea mays
  misc_feature: Ceres CLONE ID no. 1542082
  misc_feature: Ceres CDNA ID no. 40352028
  CDS (115)..(738): REFERENCED BY SEQ ID NO: 9602
aagccgtcgtctcatctgccgccgccatactcctgtccacctgagtacctgaccggcatccttccccctcctgcccgatccctcgaggcggagatccctaggccgtcggccgggatggcgggggcgctggccctcgcggtgttgctcgccgtcgcgtcgctccatgctgaggcggtgtggctggacgtgccacagtcggggaccaagtgcgtgtcggaggagatccagtctaacgtggtggtgctcaccgactattccatcatgtacgagtcccacccctattcgcaccccaccatcgccgtcaaggttacttcaccatatgggaacaccttgcatcacagtgagaattctacagttggtcaatttgcattcacaaccgcagaagctggaaactacgttgcatgcttctgggttgatagtgcagagaaaggatcaggagtatctgtgaatcttgactggaagattgggatcgcaacaaaagattgggatgctattgctaagaaggaaaaaattgagggtgtagaactagagcttcggaaacttgaagtggcagtgcaggccattcatcagaacttgatatacctcaaagaaagggaagcagagatgcgaactgtgagtgagacaacaaattcaagggtcgtctggttcagtactctgtcgctatgggtctgcattgcggtatcggttttgcaagtccgacaccttcaagggttcttcagaaagaagaagctcatttagagtctctctgtaagatgttgcgctgtggttcagatgttgttcaccttggaagggtacaattttgccttttacatggaacatttcacaccagtgatgactgatgggctacttgtactgtatgtaatttaagtacgattggatcgaaaatctatatttcagggaaaaaaatcttatatttaggctccagcaaaaaaaaaaaaaaaaaaaaaaaaaaaaaaaaaaaaaagaaaaaaaaaaaaaaaaa

SEQ ID NO: 9602 - protein, 207 aa, Zea mays
  misc_feature: Ceres CLONE ID no. 1542082
  misc_feature: Ceres CDNA ID no. 40352028
  misc_feature (54)..(117): Pfam Name: EMP24_GP25L PFAM Desc: emp24/gp25L/p24 family
MAGALALAVLLAVASLHAEAVWLDVPQSGTKCVSEEIQSNVVVLTDYSIMYESHPYSHPTIAVKVTSPYGNTLHHSENSTVGQFAFTTAEAGNYVACFWVDSAEKGSGVSVNLDWKIGIATKDWDAIAKKEKIEGVELELRKLEVAVQAIHQNLIYLKEREAEMRTVSETTNSRVVWFSTLSLWVCIAVSVLQVRHLQGFFRKKKLI

SEQ ID NO: 9603 - DNA, 2673 bp, Zea mays
  misc_feature: Ceres CLONE ID no. 1542859
  misc_feature: Ceres CDNA ID no. 36707307
  CDS (538)..(2262): REFERENCED BY SEQ ID NO: 9604
aagcgccagcgcggcagagagtcgagaccttctagctaggccgctgccacgtcaaaactagctcctccagacaaccaatcagctagccgaagccggtcgattagcatgcagcagcgctagtagacgtcgtctccgggtctccactctccacacagaaacccatacaaaatccgcatccagaatcaccggagatacgagtccgcgcgtacgttgcagttgaattgtgaagagaggctgtgcgcagtgctgctgctgcttcttcttcttcgacgcatgcacgcacatggatggtgctgctgagtgctgacctccggccgtacgtgatcttcgatctccacacggcggcaagcgatcgagaggcgtggttcccgtggcgtcaaccgacacctagcagctgctagctcatctgcttgatctctagctgagactccgagcaaaatcagccaggaacaacaagctaggccccctcacgcagaccgcacgaccgagcgcgcggcattgaccgacccatcgccgccgccgccgcctcgatcgaccatgacgcttgcgagcacggacaaggtggtgctgggatgcatcgcgttcagcatcttctgggtgctggccgtcttcccctcggtgccgttcatgccggtgggccgcaccgcgggctcgctcctgggcgccatgctcatggtgctcttccgcgtgatgaccccggaggaggcctacaaggccatcgacctcccgatcctgggcctgctcttcggcaccatggtggtcagcatcttcctggagcgcgccgacatgttcaagtacctcggcagcgcgctggcgtggcggagccggggcagcaaggacctgctgttccgcgtctgcctcgtgtccgccgtggccagcgcgctcttcaccaacgacacctgctgcgtggtgctcaccgagttcatcctcaagctggcgcggcagaacaacctgcccccgcagccgttcctgctggccctcgcctccagctccaacatcggctcctccgccacgcccatcggcaacccgcagaacctcgtcatcgccgtgcagagcggcatcaccttcggccagttcctcgtcggcgtcttcccggccatgatcgtcggcgtcgccgccaacacctgcatcctgctctgctacttctggaggtgcctctccgcgccggagaaggaccaggagggcggcgccgccgccgcggggcccgacgtcgccgtcgtggccgacgaggaggtcacctcgcacaggttcacgccggcgcggatgtcgcgcgcctcgtccgtcaacgggggcggcgccgacgccgactgcgtcggcgagctcatccgccggagcgatagcctcagccgggccgacactacgctaggcatgagcatgaggagccggagctacaactcggagggcggcgacatccaggtcgccatcaggtccatgcgcgcgtccagcatgtcgcaggagatggtggaggtgtccaccgtctgcgacaggcgcgacgacggcggtgccgggcccagaaaggtcaccaggaccaccagccaccagcgcagcgtcatcatcgaggacgcgcccgaggctgacgccgccgacgacgacgacgatggccacaagggcaaggacggtgacagcgtcaccaacaaggagaagaggtggaaggtgctcgtgtggaagactgccgtgtatctcaccacccttgggatgctggccgcgctcctcatggggctcaacatgtcctggtccgccatcactgctgctcttgtccttctcgcgcttgatttcactgacgcacaggcgtgcctggagaaggtgtcatactctttgctgatcttcttctgcggcatgttcataacggtcgacggcttcaacaggaccggcatacccaatgcgctctgggagctggtcgaaccgcactcgagaatcgacagcgccaaaggcacggcgcttctcgcagtcgtgatcctagtcctttcaaatgtggcctcaaacgttccaactgttcttctgctgggcacaagggtggcagcgtcagcaggcacaatctccccagagtcagagaagaaagcctggctcatactagcatgggtgagcacggtggccggcaacctgaccctcttgggctcggcggcgaacctgatcgtctgcgagcaggcgcggcgggcacagttcttcgggtacaacctcaccttctggagccacctccgcttcggcttgccgtcgacgatcatcatcacggcgatcggcctgctcatcgtcgccagttactgaaccccacacaagctagggtctcggcctcgcacaaacggcggggtgtgtagccagatggcaggcagaacgctgcagaaaacagcatgcagcactgcctgacatcgaaggagatgttgtactgattggcctttgtttgtacgttgtaacagtttttatgtcgttcgtgtaagtctgtacgtttcgcgcaaccgatgccgcaaggcgccgggttgcccatctgctaaggcaaataatgcgcaagactagtagatggcatggagtatagaaggccggcaccactgttctaggaaggcaaaaacttgctctagctagttcaggtaggagagccggcgaaaatgtatggtgtgcttctcgatttggtaatgtcaagggacttgtccttatgtttggagctaaaaaaaaaaaaaaaaa

SEQ ID NO: 9604 - protein, 574 aa, Zea mays
  misc_feature: Ceres CLONE ID no. 1542859
  misc_feature: Ceres CDNA ID no. 36707307
  misc_feature (16)..(526): Pfam Name: CitMHS PFAM Desc: Citrate transporter
  misc_feature: Homolog of GI Number: 34902380 NR Desc: Putative anion transporter
  misc_feature: Homolog of GI Number: 50919725 NR Desc: Putative anion transporter
  misc_feature: Homolog of GI Number: 31432379 NR Desc: contains similarity to anion transporter
  misc_feature: Homolog of GI Number: 37536612 NR Desc: putative anion transporter
  misc_feature: Homolog of GI Number: 50915978 NR Desc: putative arsenite transport subunit B
  misc_feature: Homolog of GI Number: 19717681 NR Desc: arsenite transport subunit B
  misc_feature: Homolog of GI Number: 11499889 NR Desc: arsenite transport protein
  misc_feature: Homolog of GI Number: 66777680 NR Desc: Arsenical pump membrane protein
  misc_feature: Homolog of GI Number: 72547023 NR Desc: proteophosphoglycan ppg4
  misc_feature: Homolog of GI Number: 72547036 NR Desc: proteophosphoglycan 5
MTLASTDKVVLGCIAFSIFWVLAVFPSVPFMPVGRTAGSLLGAMLMVLFRVMTPEEAYKAIDLPILGLLFGTMVVSIFLERADMFKYLGSALAWRSRGSKDLLFRVCLVSAVASALFTNDTCCVVLTEFILKLARQNNLPPQPFLLALASSSNIGSSATPIGNPQNLVIAVQSGITFGQFLVGVFPAMIVGVAANTCILLCYFWRCLSAPEKDQEGGAAAAGPDVAVVADEEVTSHRFTPARMSRASSVNGGGADADCVGELIRRSDSLSRADTTLGMSMRSRSYNSEGGDIQVAIRSMRASSMSQEMVEVSTVCDRRDDGGAGPRKVTRTTSHQRSVIIEDAPEADAADDDDDGHKGKDGDSVTNKEKRWKVLVWKTAVYLTTLGMLAALLMGLNMSWSAITAALVLLALDFTDAQACLEKVSYSLLIFFCGMFITVDGFNRTGIPNALWELVEPHSRIDSAKGTALLAVVILVLSNVASNVPTVLLLGTRVAASAGTISPESEKKAWLILAWVSTVAGNLTLLGSAANLIVCEQARRAQFFGYNLTFWSHLRFGLPSTIIITAIGLLIVASY

SEQ ID NO: 9605 - DNA, 1244 bp, Zea mays
  misc_feature: Ceres CLONE ID no. 1543185
  misc_feature: Ceres CDNA ID no. 40041454
  CDS (33)..(1058): REFERENCED BY SEQ ID NO: 9606
aaagcaaaccgggtcggccagcagacaccgccatgaggactctactacctgtggccgccggccgcgggaccgtcgcctgcgcggccacgcccgtcccccggaggtcgctgctcctctccaccgctgccgcaggtgcggcgctgcagccggagcaggtggctgggacgaggccgttgaggctgaccaggagcgtggcgagcgccgtggcaaagcccaggacctcggccgacgaggccatctcgtgggcgaagaaggacaaccgccggctcctccacgtcgtctaccgggtcggcgacctcgacaagacgatcaagttctacaccgagtgcctggggatgaagctgctcaggaagagggacattccagaggagaagtacagcaacgcgttcctcgggtacgggcccgaggaatcgcatttcgtcgtcgagctcacttacaattacggggttgacaaatatgacataggcgaagggttcggccatttcggcatcgcagtcgaggacgtggccaagacagtagagctcataagagcaaaggctgctggcaaggtcatcagggaggccggtcctgtcaagggcggcgagaccgtcatcgccttcgtggaggaccccgacggctacaagtttgagatcatcgagaggcctggaactccggagcccttgtgccaggtgatgctccgcgtcggcgaccttgaccgtgccataagcttctatgagaaggcctgcggcatggaactgctccggaagcgagatagccctgagtacaagtacacagtggcaatgatgggttacggctctgaagacaaagacgcggtgctggagctgacctacaactatggtgtcaccgagtatgccaaggggaatgcatatgcccagatcgccattggcaccgacgatgtctacaggaccgcggaggcggcgaagctgtccggaggccaggtggtgcgggagccggggcccttgctagggatcaacaccaagatcacagccatcctggaccctgatggctggaaattggtcttcgtcgacaacatggacttcgccaaggaactggagtagccacgccaacgacctcagacgccctgcaacaggattaactcgcactgctgttggtccgtaattaaaatgaaagctactagtgaaacctcaaattttcatcatgcatagaatacagaaccacctttatatttgcgaaggaccctgaatcaacgatcccagacagatgaccaaaaaaaaaaaaaaaaa

SEQ ID NO: 9606 - protein, 341 aa, Zea mays
  misc_feature: Ceres CLONE ID no. 1543185
  misc_feature: Ceres CDNA ID no. 40041454
  misc_feature (78)..(200): Pfam Name: Glyoxalase PFAM Desc: Glyoxalase/Bleomycin resistance protein/Dioxygenase superfamily
  misc_feature: Homolog of GI Number: 50252391 NR Desc: putative glyoxalase I
  misc_feature: Homolog of GI Number: 7619802 NR Desc: putative glyoxalase I
  misc_feature: Homolog of GI Number: 19310505 NR Desc: At1g67280/F1N21_10
  misc_feature: Homolog of GI Number: 21537360 NR Desc: glyoxalase I
  misc_feature: Homolog of GI Number: 9828630 NR Desc: F1N21.10
  misc_feature: Homolog of GI Number: 50933389 NR Desc: putative glyoxalase
  misc_feature: Homolog of GI Number: 50941905 NR Desc: glyoxalase I
  misc_feature: Homolog of GI Number: 37932483 NR Desc: glyoxalase I
  misc_feature: Homolog of GI Number: 16580747 NR Desc: glyoxalase I
  misc_feature: Homolog of GI Number: 83701621 NR Desc: glyoxalase I
MRTLLPVAAGRGTVACAATPVPRRSLLLSTAAAGAALQPEQVAGTRPLRLTRSVASAVAKPRTSADEAISWAKKDNRRLLHVVYRVGDLDKTIKFYTECLGMKLLRKRDIPEEKYSNAFLGYGPEESHFVVELTYNYGVDKYDIGEGFGHFGIAVEDVAKTVELIRAKAAGKVIREAGPVKGGETVIAFVEDPDGYKFEIIERPGTPEPLCQVMLRVGDLDRAISFYEKACGMELLRKRDSPEYKYTVAMMGYGSEDKDAVLELTYNYGVTEYAKGNAYAQIAIGTDDVYRTAEAAKLSGGQVVREPGPLLGINTKITAILDPDGWKLVFVDNMDFAKELE

SEQ ID NO: 9607 - DNA, 426 bp, Zea mays
  misc_feature: Ceres CLONE ID no. 1543705
  misc_feature: Ceres CDNA ID no. 25445785
  CDS (99)..(296): REFERENCED BY SEQ ID NO: 9608
aatccctaatcccagcgcagcacaaacaaacaccgcgccgccgccacagctttgccctacagaatccttttactccgaagattctcaagacgcccctgatggctccccgcgtcgcctccgctctgctcttcgtcgtggccgtcctcgtggcctccgcggcggcgcaggagtccatggcgcccgcgtctgctccggcgccgggaccggtcgctggcgcggcctccgctccggcctccgctgtggccgtggtgtcgtccgcactgctgtccctccttatgacggccctgatgcagtagaagtatcatactagatttgagcgggaatttggttcagtgttgctattcctcattctttttgtatcatatatgtctgcgacatttatatatatgaataaagttggatgatctacaaaaaaaaaaaaaaaaa

SEQ ID NO: 9608 - protein, 65 aa, Zea mays; identical to SEQ ID NO: 7046
  misc_feature: Ceres CLONE ID no. 1543705
  misc_feature: Ceres CDNA ID no. 25445785

SEQ ID NO: 9609 - DNA, 2248 bp, Zea mays
  misc_feature: Ceres CLONE ID no. 1543773
  misc_feature: Ceres CDNA ID no. 40041455
  CDS (233)..(1867): REFERENCED BY SEQ ID NO: 9610
aatcgacctcgatccattgaataattttactaatcaaattcttgttgggatatattcctccaattcccctcctcctcccaacaaggcaacaacaatctgttccggccgccaaacaaaacccaaaaaaaaaacacactgaacccaataatccgatcccacagaaacttttctctcggtccgttcgatcgatcgctgccgtgtcgtttgccagacaccatcagcacccaaaaccatggcctgcaacctggctcagtgcgccaccgccgccgcggcgaccgtcgcgccccgcacccctcgccctgctgcgtccgcgtccgtctccttctccgcgaggaagccggcgggcggcagcctgcggctgcagcggcaggcgtgctgcgagccgtcggtggcgccgtcgcgggcggtgttcgcctgccgggccgcggcgtcggggagcgcggccgacctggcctccgggggcaggaggtcgtccggcgtgccggtgttcgtcatgatgccgctggacaccgtcaaggagtgcggcaccgcgctgcaccgccgcaaggcggtgcaggccagcctctccgcgctcaagagcgcgggcgtcgagggcgtcatggtggacgtgtggtggggcatcgccgagcgcgacggcccgggccggtacaacttcgcgggctacgcggagctcatggagatggcgcgcaaggccgggctcaaggtccaggccgtcatgtccttccaccagtgcggcggcaacgtcggcgactccgtcagcatcccgctgccgcggtgggccgcggaggagatggagagggaccaggacctctgctacaccgaccagtggggccgccgcaactacgagtacgtctcgctcggctgcgacgccatgcccgtcctcaagggacgcacgcccgtcgagtgctacaccgacttcatgcgcgcgttccgcgaccacttcgccgactacctcggcaacaccatcgtggaaatccaagtcggcatgggccccgccggcgagctgcgctacccgtcctacccggagagcaacggcacctggaagttcccaggcatcggcgccttccagtgcaacgacaggtacatgcgtagccgcctgaaggcggcagcggaggcggccggcaagcctgagtggggccacggtgggccgaccgacgctggcggctacaacaactggccggaggacaccgtcttcttccgcggcgacaacggtgggtggagcaccgagtacggcgacttcttcctgtcgtggtactcgcagatgctgctggagcacggcgaccgcatcctgtcgggcgccacgtccgtgttcggcgcggcgcccgtggaggtctccgtgaaggtggccggcatccactggcactacggcagccggtcccacgcccccgagctcaccgcgggctactacaacacgcggcgccacgacgggtacctcaccatcgcgcgcctcctggcgcgccacggcgccgtgctcaacttcacctgcgtggagatgcgggaccacgagcagccgcaggaggcgcggtgcatgccggaggcgctggtccggcaggtgggcgccgcggcgcgcgccgccggggtgggcctcgcgggcgagaacgcgctgccgcggtacgacggcacggcgcacgaccaggtggtcaccacggccgccgagcgcgccgccgaggaccggatggtggccttcacgtacctgcgcatgggccccgacctcttccacccggacaactggcggcgcttcgccgccttcgtgcgccgcatgaacggcgccgggtcgtgccgggaggccgcggagcgggaggcgcacggcgtcgcgcaggccaccgggtcgctggtgcacgaggccgccgtcgcgctgcggagctgaccggccgggacgggacgggacggaacggaagcctacgatcgactgtacatacaggggttgggacttgggagggagctcgggttcttgttgggttttcctttgggtggagagcgagggagcgcagtcgagagccagcgagcagtctctcgtgcagtgcagtgcagtgcagtgcagtgcagctccggcgtagatgagattgtattgtgaccaagccgggagggaaagcagggaggggaggacaaagatgttttgtcacgtttcaggctccggccatcgccggagtttgtccggggaatatatcgatttcctacagaaatccgcggaaaatgatgtgttcctgcactgcctgattcggtgccgcgctaaaaaaaaaaaaaaaaa

SEQ ID NO: 9610 - protein, 544 aa, Zea mays
  misc_feature: Ceres CLONE ID no. 1543773
  misc_feature: Ceres CDNA ID no. 40041455
  misc_feature (111)..(158): Pfam Name: AP_endonuc_2 PFAM Desc: Xylose isomerase
  misc_feature: Homolog of GI Number: 15082058 NR Desc: beta
  misc_feature: Homolog of GI Number: 59668408 NR Desc: beta
  misc_feature: Homolog of GI Number: 31432570 NR Desc: putative amylase
  misc_feature: Homolog of GI Number: 20465963 NR Desc: putative beta
  misc_feature: Homolog of GI Number: 7268460 NR Desc: putative beta
  misc_feature: Homolog of GI Number: 21593185 NR Desc: putative beta
  misc_feature: Homolog of GI Number: 17224922 NR Desc: putative chloroplast
  misc_feature: Homolog of GI Number: 37536926 NR Desc: putative chloroplast
  misc_feature: Homolog of GI Number: 6729696 NR Desc: Chain A
  misc_feature: Homolog of GI Number: 3779260 NR Desc: beta
MACNLAQCATAAAATVAPRTPRPAASASVSFSARKPAGGSLRLQRQACCEPSVAPSRAVFACRAAASGSAADLASGGRRSSGVPVFVMMPLDTVKECGTALHRRKAVQASLSALKSAGVEGVMVDVWWGIAERDGPGRYNFAGYAELMEMARKAGLKVQAVMSFHQCGGNVGDSVSIPLPRWAAEEMERDQDLCYTDQWGRRNYEYVSLGCDAMPVLKGRTPVECYTDFMRAFRDHFADYLGNTIVEIQVGMGPAGELRYPSYPESNGTWKFPGIGAFQCNDRYMRSRLKAAAEAAGKPEWGHGGPTDAGGYNNWPEDTVFFRGDNGGWSTEYGDFFLSWYSQMLLEHGDRILSGATSVFGAAPVEVSVKVAGIHWHYGSRSHAPELTAGYYNTRRHDGYLTIARLLARHGAVLNFTCVEMRDHEQPQEARCMPEALVRQVGAAARAAGVGLAGENALPRYDGTAHDQVVTTAAERAAEDRMVAFTYLRMGPDLFHPDNWRRFAAFVRRMNGAGSCREAAEREAHGVAQATGSLVHEAAVALRS

SEQ ID NO: 9611 - DNA, 954 bp, Zea mays
  misc_feature: Ceres CLONE ID no. 1543829
  misc_feature: Ceres CDNA ID no. 25446547
  CDS (143)..(733): REFERENCED BY SEQ ID NO: 9612
actccgtcccttgggccgcctggtgttcttgtatatcacgcgtccacgccactgctaagctgctccccgttcgccaggtcggcgaccaggcgaaacgtgctgctgctgccgctgcaagaagaagaataggtacacagacagcatgtccggagttcaggcgatgccgacggccgtgggcgtcgcggggctgagagggtcagggttggttagcagcagcagtaccagcttgttcgccggcgactgcaagaggaaggctcgccgcccgtcgtactcggcctgggccctcaggcagagccggatcggcagcaggagcaggatcaggagcaagaggggcctcggcatcgtctgcaacctcgcgggacagtacgaggattccttcgacgacgtccagcggcaactgatgaactacttcacgtacaaggccgtgaggaccgtgctgacccagctctacgagctgaacccgccgagctaccgctggttctacaacttcgtcgctgtcaacaagcctaccgacggcaagcatttcctccgtgctctcggcaaggagaggcaggagctcgcagagcgagtgatggtcaccaggcttcacctgtacgggaaatggataaagaaatgcgaccatgccaagacgtacgagaagatctccgacgagaacctggcgctgatgcgggagcggctgatggagacggtcatctggccgaccgacgacagcagcacggagaagatcggctgatacctgatgcctgccaaggcgccgagccctttggggttgctgatcaagcttagctccttctattagcatgtatagcagcactctgggtttctctatcagtcagccagccagtcagtcagtgggttgtatataatcggagttgtagtagacagtatacatttctctggggcagtgtttattacaggctatcactgtttgaggtgctaaaaaaaaaaaaaaaa

SEQ ID NO: 9612 - protein, 196 aa, Zea mays
  misc_feature: Ceres CLONE ID no. 1543829
  misc_feature: Ceres CDNA ID no. 25446547
  misc_feature (87)..(193): Pfam Name: RcbX PFAM Desc: RbcX protein
  misc_feature: Homolog of GI Number: 55650837 NR Desc: RbcX protein
  misc_feature: Homolog of GI Number: 55650840 NR Desc: RbcX protein
  misc_feature: Homolog of GI Number: 71676315 NR Desc: Chaperonin
  misc_feature: Homolog of GI Number: 57335291 NR Desc: chaperonin
  misc_feature: Homolog of GI Number: 55650843 NR Desc: RbcX protein
  misc_feature: Homolog of GI Number: 55650816 NR Desc: RbcX protein
  misc_feature: Homolog of GI Number: 55650846 NR Desc: RbcX protein
MSGVQAMPTAVGVAGLRGSGLVSSSSTSLFAGDCKRKARRPSYSAWALRQSRIGSRSRIRSKRGLGIVCNLAGQYEDSFDDVQRQLMNYFTYKAVRTVLTQLYELNPPSYRWFYNFVAVNKPTDGKHFLRALGKERQELAERVMVTRLHLYGKWIKKCDHAKTYEKISDENLALMRERLMETVIWPTDDSSTEKIG

SEQ ID NO: 9613 - DNA, 1114 bp, Zea mays
  misc_feature: Ceres CLONE ID no. 1543856
  misc_feature: Ceres CDNA ID no. 40041456
  CDS (120)..(842): REFERENCED BY SEQ ID NO: 9614
agactcgtctcggatcgtgctaattctacttctacttcggaaccgccgccgctcccggcgcctcggattatcaactaccgcaggaggtcgcggcggcaggatcggtggtccagcgtgcgatggcggcggcgcctaccgtgcggggctacgggccagcgtcgccgtcgtcgtcgtcggtggcgctgcctcggccgcgatcgcgggtgcccgcaccgctcgtgcccgtgacgacgcggcggggggcgccgtcggtgcgcctgcgcgcggcgggcgcggacacgcctccccgcggcggcctgcagctccagcggcgggaggaggacgaggggctgccggggaccgtgttgggccgaggggaggacgatgaggtgtcggagaaggtcggggaggagaaggtggagaggtggatgcgggactcgatcgcggagatcgtgcggcacgtcggggaggcgccgttcctggtgcacctgttcagcagcggcgagggcgagcgcgtgacggtgcggcgggagcccgcggcgccggagagctggccggacgtgcggcgccggtgggggccaggcggggcgcggaggccggacgggatcatcctggtcgagcaggtggcctcggacggcggcggggcctccgccgcctcggaggcggcgcggcaggtgtgggggctggtggtgcaggcgcgcggcatggagcgcgcgtcgtgctacgtgctttccacctgccgcgtgcgctcgtcggccgggttctgcacgcacttctgcctcgcgcgggcgcagtgcttcggcgaccctgtcgagctccagctccgcaacgcctggctcaaccgcctggccggccgccggtagccgcccgtcggctgctgctgctagtgctactgatactactaataggattcgaatcgatgctccaaggaccaaatgcaatgatgcctcctcttcgctggcaagaacgaggaagagaagcttgcagattggatttgaagcaggggagacgaacatatcttttcgttcacttggggttctcccggaattggatatcaattgtacagattattgaatgtaaatttgcctattcaatcaagaagcaattcatcgagtcagaaaaaaaaaaaaaaaaa

SEQ ID NO: 9614 - protein, 240 aa, Zea mays
  misc_feature: Ceres CLONE ID no. 1543856
  misc_feature: Ceres CDNA ID no. 40041456
  misc_feature: Homolog of GI Number: 66780099 NR Desc: PE
  misc_feature: Homolog of GI Number: 66776365 NR Desc: PE
  misc_feature: Homolog of GI Number: 7441215 NR Desc: hypothetical glycine
  misc_feature: Homolog of GI Number: 2911274 NR Desc: spidroin 1
  misc_feature: Homolog of GI Number: 2605798 NR Desc: minor ampullate silk protein MiSp1
  misc_feature: Homolog of GI Number: 9453857 NR Desc: EBNA
  misc_feature: Homolog of GI Number: 395147 NR Desc: glycine
  misc_feature: Homolog of GI Number: 2914731 NR Desc: dragline silk protein spidroin 1
  misc_feature: Homolog of GI Number: 102820 NR Desc: major ampullate fibroin protein
MAAAPTVRGYGPASPSSSSVALPRPRSRVPAPLVPVTTRRGAPSVRLRAAGADTPPRGGLQLQRREEDEGLPGTVLGRGEDDEVSEKVGEEKVERWMRDSIAEIVRHVGEAPFLVHLFSSGEGERVTVRREPAAPESWPDVRRRWGPGGARRPDGIILVEQVASDGGGASAASEAARQVWGLVVQARGMERASCYVLSTCRVRSSAGFCTHFCLARAQCFGDPVELQLRNAWLNRLAGRR

SEQ ID NO: 9615 - DNA, 1035 bp, Zea mays
  misc_feature: Ceres CLONE ID no. 1543864
  misc_feature: Ceres CDNA ID no. 25446548
  CDS (1)..(885): REFERENCED BY SEQ ID NO: 9616
ggagtggacatgaatccctttctaacgactgctcatccgatggggagcgtgcgtgcgtacgggtgcgacgcgtcggtgctgctggacccgacgccggcgaacccggagacggagaagacggcgccgatcaacatcgggctggcggcgttcgaggtgatcgacgagatcaaggcggcgctggaggagcggtgcccggggacggtgtcgtgcgcggacatcgtggtgtacgcggcccgggacgcgtcgagcctgctgagcaacgggcacgtccacttcgcggcgcccgcggggcggctggacggcgtggtgtcccgcgccgccgacgcgcagcgcgacctgccggactccaccttcaccgtgtccgagctgatccgcaacttccggcgcaagaacttcacggtggaggagctggtgatcctgtcgggcgcgcacgccgtcggcgtcggccactgctcctcgttccgcgcgcgcctgtcggcgccgccggcgcagatcgtgccggcgtaccggaacctgctgtcgggcaagtgcgcggcggcggcgggcggcgccgacgaccccgtggtggccaacaacgtgcgcgacgaggacccgcgcgccgtcgcggcggccttcccgtccttcctcgggaagctgcgcaaggccagggactttctggacaacagctactaccacaacaacctggcaaggatcgtcaccttcaactccgactggcaactgctcacggagaaggaggcgctggggcacgtcaaggagtacgccgagaacggcaccctctgggacgaggacttctccgacgcgctcctcaagctcagccggctgcccatgccgccgcacagcaagggcgagatcaggaagacgtgccgctgggtcaaccaccactgatcctgctcaagctctgcacccggccggacggaaatataccagatgggtcttcacgccgatttgtttcgatcttctttcattttgttgctgtatgtttgtttgattattatctgatgatatgcatgtgtttttttaaaaaaaaaaaaaaaa

SEQ ID NO: 9616 - protein, 291 aa, Zea mays
  misc_feature: Ceres CLONE ID no. 1543864
  misc_feature: Ceres CDNA ID no. 25446548
  misc_feature (1)..(253): Pfam Name: peroxidase PFAM Desc: Peroxidase
  misc_feature: Homolog of GI Number: 51038244 NR Desc: putative peroxidase
  misc_feature: Homolog of GI Number: 34894404 NR Desc: putative peroxidase
  misc_feature: Homolog of GI Number: 55701065 NR Desc: TPA: class III peroxidase 99 precursor
  misc_feature: Homolog of GI Number: 34894394 NR Desc: putative peroxidase
  misc_feature: Homolog of GI Number: 55701001 NR Desc: TPA: class III peroxidase 67 precursor
  misc_feature: Homolog of GI Number: 34894402 NR Desc: putative peroxidase
  misc_feature: Homolog of GI Number: 55700887 NR Desc: TPA: class III peroxidase 10 precursor
  misc_feature: Homolog of GI Number: 34894398 NR Desc: putative peroxidase
  misc_feature: Homolog of GI Number: 51038245 NR Desc: putative peroxidase
  misc_feature: Homolog of GI Number: 55700999 NR Desc: TPA: class III peroxidase 66
  misc_feature: Useful for making ornamental plants with modified flowers
  misc_feature: Useful for sterility
MNPFLTTAHPMGSVRAYGCDASVLLDPTPANPETEKTAPINIGLAAFEVIDEIKAALEERCPGTVSCADIVVYAARDASSLLSNGHVHFAAPAGRLDGVVSRAADAQRDLPDSTFTVSELIRNFRRKNFTVEELVILSGAHAVGVGHCSSFRARLSAPPAQIVPAYRNLLSGKCAAAAGGADDPVVANNVRDEDPRAVAAAFPSFLGKLRKARDFLDNSYYHNNLARIVTFNSDWQLLTEKEALGHVKEYAENGTLWDEDFSDALLKLSRLPMPPHSKGEIRKTCRWVNHH

SEQ ID NO: 9617 - DNA, 2554 bp, Zea mays
  misc_feature: Ceres CLONE ID no. 1543867
  misc_feature: Ceres CDNA ID no. 40041457
  CDS (209)..(2248): REFERENCED BY SEQ ID NO: 9618
actctcaggtggccaggatattttttctggccccttcctgccctcttcacactgacccatgtgttgttctctatccctggaaagctatacctccttacccctatcagcttctcctcacatctcctctcgtcgccacccatgctatcaccgctctgatcacaagcaaggcaaaccctcactgttctatcaacgcccctcccttagctagatggcttcagcgaacaactggctgggcttctcgctctcgggccaggataacccgcagcctaaccaggatagctcgcctgccgccggtatcgacatctccggcgccagcgacttctatggcctgcccacgcagcagggctccgacgggcatctcggcgtgccgggcctgcgggacgatcacgcttcttatggtatcatggaggcctacaacagggttcctcaagaaacccaagattggaacatgaggggcttggactacaacggcggtggctcggagctctcgatgcttgtggggtccagcggcggcggcgggggcaacggcaagagggccgtggaagacagcgagcccaagctcgaagatttcctcggcggcaactcgttcgtctccgatcaagatcagtccggcggttacctgttctctggagtcccgatagccagcagcgccaatagcaacagcgggagcaacaccatggagctctccatgatcaagacctggctacggaacaaccaggtggcccagccccagccgccagctccacatcagccgcagcctgaggaaatgagcaccgacgccagcggcagcagctttggatgctcggattcgatgggaaggaacagcatggtggcggctggtgggagctcgcagagcctggcgctctcgatgagcacgggctcgcacctgcccatggttgtgcccagcggcgccgccagcggagcggcctcggagagcacatcgtcggagaacaagcgagcgagcggtgccatggattcgcccggcagcgcggtagaagccgtaccgaggaagtccatcgacacgttcgggcaaaggacctctatatatcgaggtgtaacaaggcatagatggacagggcggtatgaggctcatctatgggataatagttgtagaagggaagggcagagtcgcaagggtaggcaagtttaccttggtggctatgacaaggaggacaaggcagcaagggcttatgatttggcagctctcaagtattggggcactacgacaacaacaaatttccctataagcaactacgaaaaggagctagaagaaatgaaacatatgactagacaggagtacattgcatacctaagaagaaatagcagtggattttctcgtggggcgtcaaagtatcgtggagtaactagacatcatcagcatgggagatggcaagcaaggatagggagagttgcaggaaacaaggatctctacttgggcacattcagcaccgaggaggaggcggcggaggcctacgacatcgccgcgatcaagttccgcggtctcaacgccgtcaccaacttcgacatgagccgctacgacgtgaagagcatcctcgagagcagcacactgcctgtcggcggtgcggccaggcgcctcaaggacgccgtggaccacgtggaggccggcgccaccatctggcgcgccgacatggacggcgccgtgatctcccagctggccgaagccgggatgggcggctacgcctcgtacggccaccacggctggccgaccatcgcgttccagcagccgtcgccgctctccgtccactacccgtacggccagccgtcccgcgggtggtgcaaacccgagcaggacgcggccgccgccgcggcgcacagcctgcaggacctccagcagctgcacctcggcagcgcggcccacaacttcttccaggcgtcgtcgagctccacagtctacaacggcggcgccggcgccagtggtgggtaccagggcctcggtggtggcagctctttcctcatgccgtcgagcactgtcgtggcggcggccgaccaggggcacagcagcacggccaaccaggggagcacgtgcagctacggggacgaccaccaggaggggaagctcatcggttacgacgccgccatggtggcgaccgcagctggtggagacccgtacgctgcggcgaggaacgggtaccagttctcgcagggctcgggatccacggtgagcatcgcgagggcgaacgggtacgctaacaactggagctctcctttcaacaacggcatggggtgacgacgacggtacggtccaacgaacggagagggcagaagctagtggctagtgatagggggttagctagctagaagatcccaagtctaggttagagttatttggtcatcgttgtcgtgtttcgacgtgctcaggttctggttcgattctgcacaattaacccgtgcatgcacgcgtgtgcctttctggaagctggtaatggcaggtcagggtaagtaaagttagcgttgtaagttatcctgatgtgctgttaattttgggtagtttcagaaggtctagccaatctcgtcggaaaaaaaaaaaaaaaaa

SEQ ID NO: 9618 - protein, 679 aa, Zea mays
  misc_feature: Ceres CLONE ID no. 1543867
  misc_feature: Ceres CDNA ID no. 40041457
  misc_feature (278)..(350): Pfam Name: AP2 PFAM Desc: AP2 domain
  misc_feature: Homolog of GI Number: 50910463 NR Desc: AP2/EREBP transcription factor
  misc_feature: Homolog of GI Number: 50926274 NR Desc: OSJNBa0014K14.15
  misc_feature: Homolog of GI Number: 70663930 NR Desc: OSJNBa0014K14.16
  misc_feature: Homolog of GI Number: 34907686 NR Desc: putative ovule development protein aintegumenta
  misc_feature: Homolog of GI Number: 21304227 NR Desc: ovule development aintegumenta
  misc_feature: Homolog of GI Number: 58761187 NR Desc: AP2/EREBP transcription factor BABY BOOM
  misc_feature: Homolog of GI Number: 62733320 NR Desc: AP2/EREBP transcription factor BABY BOOM1
  misc_feature: Homolog of GI Number: 46451387 NR Desc: AP2/EREBP transcription factor
  misc_feature: Homolog of GI Number: 56236084 NR Desc: At1g51190
  misc_feature: Homolog of GI Number: 79409851 NR Desc: PLT1
  misc_feature: Useful for delaying flowering time
  misc_feature: Useful for making plants with increased biomass and foliage
  misc_feature: Useful for making plants with increased biomass and foliage
MASANNWLGFSLSGQDNPQPNQDSSPAAGIDISGASDFYGLPTQQGSDGHLGVPGLRDDHASYGIMEAYNRVPQETQDWNMRGLDYNGGGSELSMLVGSSGGGGGNGKRAVEDSEPKLEDFLGGNSFVSDQDQSGGYLFSGVPIASSANSNSGSNTMELSMIKTWLRNNQVAQPQPPAPHQPQPEEMSTDASGSSFGCSDSMGRNSMVAAGGSSQSLALSMSTGSHLPMVVPSGAASGAASESTSSENKRASGAMDSPGSAVEAVPRKSIDTFGQRTSIYRGVTRHRWTGRYEAHLWDNSCRREGQSRKGRQVYLGGYDKEDKAARAYDLAALKYWGTTTTTNFPISNYEKELEEMKHMTRQEYIAYLRRNSSGFSRGASKYRGVTRHHQHGRWQARIGRVAGNKDLYLGTFSTEEEAAEAYDIAAIKFRGLNAVTNFDMSRYDVKSILESSTLPVGGAARRLKDAVDHVEAGATIWRADMDGAVISQLAEAGMGGYASYGHHGWPTIAFQQPSPLSVHYPYGQPSRGWCKPEQDAAAAAAHSLQDLQQLHLGSAAHNFFQASSSSTVYNGGAGASGGYQGLGGGSSFLMPSSTVVAAADQGHSSTANQGSTCSYGDDHQEGKLIGYDAAMVATAAGGDPYAAARNGYQFSQGSGSTVSIARANGYANNWSSPFNNGMG

SEQ ID NO: 9619 - DNA, 991 bp, Zea mays
  misc_feature: Ceres CLONE ID no. 1544630
  misc_feature: Ceres CDNA ID no. 36707434
  CDS (64)..(801): REFERENCED BY SEQ ID NO: 9620
actcaaacgccacttgttctccctccctctctgcctgaccagctaggatcagcggaagcagcaatggtgatggcgtcgtcgagcgggctgaggagctgcagcgccgtgggcgtgcccagcctgctggcgccgtcgtcccggtccggccgcctggcgccgttctgcgccaacgccaccacctctggccgcgtcaccatgtccgcggagtggatgcccggccagccacgccctgcccacctcgacggctcctctcccggggacttcggcttcgatccgctgggcctcgcgaccgtgccggagaacttcgagcggttcaaggagtcagaggtgtaccactgccgctgggccatgcttgccgtccccgggatcctggtgccggaagctctgggcctgggcaactgggtgaaggcgcaggagtgggcggccgtccccggcgggcaggccacgtacctgggcgccccggtgccgtggggcacgctgccgaccatcctggtgatcgagttcgtggccatcgccttcgccgagcaccagcgcaccatggagaaggaccccgagaagaagaagtaccccggcggcgccttcgacccgctcggcttctccaaggaccccgccaagttcgaggagtacaagctcaaggagatcaagaacggccgcctcgccatgctggccttcgtcggcttctgcgtccagcagtcggcgtaccccggcaccggcccgctggagaacctcgcctcccacctcgccgacccgtggcacaacaacatcggcgacatcatcatccccagatcaatctccccttgagctcagctcagctgctggttgctgtttcctgtgtacgactaggccctgcctgtacaacgagcgacgacggtgacttcccgcccggaaattaaaccctcgtaatgtaaagcttatgttattaagtagcggctactcttgtagtcttgtctgtatcaaatataaactggtttgttaaaaaaaaaaaaaaaaa

SEQ ID NO: 9620 - protein, 243 aa, Zea mays
  misc_feature: Ceres CLONE ID no. 1544630
  misc_feature: Ceres CDNA ID no. 36707434
  misc_feature (52)..(209): Pfam Name: Chloroa_b PFAM Desc: Chlorophyll A
  misc_feature: Homolog of GI Number: 54290899 NR Desc: chlorophyll a/b
  misc_feature: Homolog of GI Number: 6685157 NR Desc: chlorophyll a/b binding protein precursor
  misc_feature: Homolog of GI Number: 544700 NR Desc: light
  misc_feature: Homolog of GI Number: 493723 NR Desc: photosystem I light
  misc_feature: Homolog of GI Number: 170388 NR Desc: chlorophyll a/b
  misc_feature: Homolog of GI Number: 82079 NR Desc: chlorophyll a/b
  misc_feature: Homolog of GI Number: 13265501 NR Desc: AT3g54890
  misc_feature: Homolog of GI Number: 23507771 NR Desc: At3g54890/F28P10_130
  misc_feature: Homolog of GI Number: 115764 NR Desc: Chlorophyll a
  misc_feature: Homolog of GI Number: 20788 NR Desc: Type 1 chlorophyll a /b
MASSSGLRSCSAVGVPSLLAPSSRSGRLAPFCANATTSGRVTMSAEWMPGQPRPAHLDGSSPGDFGFDPLGLATVPENFERFKESEVYHCRWAMLAVPGILVPEALGLGNWVKAQEWAAVPGGQATYLGAPVPWGTLPTILVIEFVAIAFAEHQRTMEKDPEKKKYPGGAFDPLGFSKDPAKFEEYKLKEIKNGRLAMLAFVGFCVQQSAYPGTGPLENLASHLADPWHNNIGDIIIPRSISP

SEQ ID NO: 9621 - DNA, 1036 bp, Zea mays
  misc_feature: Ceres CLONE ID no. 1544632
  misc_feature: Ceres CDNA ID no. 25402231
  CDS (129)..(554): REFERENCED BY SEQ ID NO: 9622
aaaccctagaaaaagctcactcaccttccttactactgctcactagtcactacacaccaaccaaaggaaggcccctcgcacctcttctgtggctgtcgtcgtttgcctttccgtccgttagccaagccatgggcaactgcctcaacacggcctccaagcggagtcaccggggcatgcttttgccggaggaggaagagagcctctcggagataagaaggataagccagctgcttcgggaggaggaggaggacggctacgaggtggtgggtatgcactccgtctccgagcagctggtgcaggaggtggtggccgtggctccgggggtgacggcgcccgcagagggcctcaaggtgaagatcgtgctgacgcgcggcgagctggagtggctcatggcgcagctcaagagcggcgagcagcgcctcgaggacgtgctccagcacatgcaggctgctaagggagctggcggcggcggtggctccttcgctggcgacaacaaggccggctggcggccgcgcctcgagagcatcctcgagagctcggagacccaaagctgataccggcctgagcatgtcctcgctggaccggctccttgaattcagatcttgtccatgcctgtaggtttgtcgcttgctttcttgatgtttggtctggatcggtggagatggaggccgtcgatggatcggagtcagggagaggcttaaattcttgttgggtttttttaacaagggactggccttgttacaactctgctactaggctggagcctggagggagggacgatgatccatcagatgggctatgttactctctagatcatcgagatgttaattaggtctcttgtgcagtgcagctcagccaattagcatcttctttcactttttgcctttttgcgctgttacttagatcattatctttcgtaaatagcggtgcgaatgagatggcatctgaagccctctgtgtctgtaataatctctgactaggtcctgaatctgattgattcttcctaagtaggaggagctaaaaaaaaaaaaaaaaa

SEQ ID NO: 9622 - protein, 141 aa, Zea mays
  misc_feature: Ceres CLONE ID no. 1544632
  misc_feature: Ceres CDNA ID no. 25402231
MGNCLNTASKRSHRGMLLPEEEESLSEIRRISQLLREEEEDGYEVVGMHSVSEQLVQEVVAVAPGVTAPAEGLKVKIVLTRGELEWLMAQLKSGEQRLEDVLQHMQAAKGAGGGGGSFAGDNKAGWRPRLESILESSETQS

SEQ ID NO: 9623 - DNA, 838 bp, Zea mays
  misc_feature: Ceres CLONE ID no. 1544761
  misc_feature: Ceres CDNA ID no. 25446549
  CDS (101)..(571): REFERENCED BY SEQ ID NO: 9624
agtgctttcttagaggtgggttggcttctcctccccctccggttcgggttcgggttcgtgaggttctccggggttcggtttcgtgggtgagcggatcgagatggcggcgtcggatgttgagtaccgctgcttcgtcggcggcctcgcctgggccacggacgaccactccctccacaacgccttcagcacctacggcgaggtcctcgagtccaagatcatcctcgatcgggagacgcagaggtcccgcggcttcggcttcgtcaccttctccacggaggaggcgatgcggaacgccatcgagggcatgaacggcaaggagctggacggccgcaacatcaccgtcaacgaggcccagtcccgcggcggccgtggaggcggcggcggtgggtacggtggtggccgtggaggcggcggctacggcggtggcgggcgccgtgatggcggcggcggctacggcggtggcggcggcggctacggtggcggcggcggctacggtggtggtggcggcggctacggcggtggcaaccgtggcggcggctacggcaactccgacgggaactggaggaactgagcggtggggcccgcgcggccaagttatcctgttcgctaccgtgttgtttaccctagtccagagggtttatcttcgttcgtctcatgtttgttgttgcccatctgtgtttttgattgcaaggtcgctttgtgtcagttgttagtgctgtgttcatcctcggctccagcagacccatgcatcaaccagcatggactgcggatcgatggatgctgttacccccgtcaggctttatcctaagttaatcttcaaggaaaaaaaaaaaaaaaa

SEQ ID NO: 9624 - protein, 156 aa, Zea mays; identical to SEQ ID NO: 8912
  misc_feature: Ceres CLONE ID no. 1544761
  misc_feature: Ceres CDNA ID no. 25446549
  misc_feature: The plant flowers significantly late compared to wild-type.
  misc_feature: Useful for making plants with modulated growth and phenotype characteristics
  misc_feature: null
  misc_feature: The sequence is a functional homolog of  SEQ ID NO 1016 in the  11/435,388 US patent application
  misc_feature: Useful for making plants with altered Lignin content
  misc_feature: Useful for making plants with altered alkaloid content
  misc_feature: Useful for making plants with modulated flowering time
  misc_feature: Useful for making plants with modulated nitrogen use efficiency
  misc_feature (48)..(151): Pfam Name: GRP PFAM Desc: Glycine rich protein family
  misc_feature: Homolog of GI Number: 22293 NR Desc: glycine
  misc_feature: Homolog of GI Number: 20257675 NR Desc: glycine
  misc_feature: Homolog of GI Number: 20257691 NR Desc: glycine
  misc_feature: Homolog of GI Number: 20257683 NR Desc: glycine
  misc_feature: Homolog of GI Number: 20257705 NR Desc: glycine
  misc_feature: Homolog of GI Number: 20257693 NR Desc: glycine
  misc_feature: Homolog of GI Number: 20257669 NR Desc: glycine
  misc_feature: Homolog of GI Number: 20257709 NR Desc: glycine
  misc_feature: Homolog of GI Number: 20257719 NR Desc: glycine
  misc_feature: Homolog of GI Number: 20257713 NR Desc: glycine
  misc_feature: Useful for delaying flowering time
  misc_feature: Useful for increasing chlorophyll and photosynthetic capacity
  misc_feature: Useful for making bigger plants
  misc_feature: Useful for making ornamental plants with modified flowers
  misc_feature: Useful for making plants with increased biomass and foliage
  misc_feature: Useful for making plants with increased biomass and foliage
  misc_feature: Useful for making plants with increased biomass and foliage
  misc_feature: Useful for making shorter plants
  misc_feature: Useful for making stronger plants
  misc_feature: Useful for sterility

SEQ ID NO: 9625 - DNA, 1219 bp, Zea mays
  misc_feature: Ceres CLONE ID no. 1544895
  misc_feature: Ceres CDNA ID no. 25446550
  CDS (162)..(983): REFERENCED BY SEQ ID NO: 9626
actagaaaaaatccagtgggaaaaaaaaaacaaaaagggtaccggaagcggcgaaagcctcgccccccgccgctctcgcatcgtctccggagcgcacgtcagatcaggtgcgccgcgcccccctcgcctaagctgcgacgaccatccatcgaacaggaaggatgacgggctccatggatctcccggccaagggcgggttcagcttcgacctgtgccgccggaacaacatgctggagaagaacgggctcaaggtcccgggattcaggaagaccgggacaaccatcgtcggcctcgtctttcaggatggggttgttcttggggcagacacaagggcaactgagggccccatagttgctgataagaactgtgagaaaatccactttatggcaccgaatatatactgctgtggagcaggaactgctgcggacacggaggccgttacagatatggtgagctcccagctacagcttcaccgttatgcaacgggccgcgaatcaagagttgtaactgctcttacactactgaagtcacacctcttcaagtatcaaggccatgtcagtgctgcccttgttcttggtggagtggattgtactgggccacatttacacactgtttatccacacgggtccactgatactcttccttttgccaccatgggctctggttctcttgctgcaatgtcagtgtttgaatcgaagtacaaagaaggccttactagggaggagggaatacagattgtgtgcgaagcaatctgtgctggtattttcaatgacttgggtagtgggagcaacgtggacgtctgcgtgataaccaaggggaagacagaatacttgagaaaccaccagttgccgaatcccaggacttatgctagttcaaagggatacagtttcaccaaggggcagactgaggtactgtcttcaaaggtcacacttctaaagcagaaggttgaggtcgccgagggtggtgatgctatggaggagtgatcttgcatcctgcattcatacaagcatattctgaatctgtgtaactttgcttagtggatcagctagaacaagaaaaaagaaaatttggagatctttgctgtactcgctggaccaaagccagggttcttatgctaaatgtgtttctaatgtttggcacattttaaattgcttgttgtttccgaatgtttaaaaccggtgaaggtatggtatttgcttggagaaaaaaaaaaaaaaaa

SEQ ID NO: 9626 - protein, 273 aa, Zea mays
  misc_feature: Ceres CLONE ID no. 1544895
  misc_feature: Ceres CDNA ID no. 25446550
  misc_feature (35)..(216): Pfam Name: Proteasome PFAM Desc: Proteasome A
  misc_feature: Homolog of GI Number: 50933089 NR Desc: 20S proteasome beta subunit
  misc_feature: Homolog of GI Number: 9758084 NR Desc: 20S proteasome beta subunit PBB2
  misc_feature: Homolog of GI Number: 30023762 NR Desc: At3g27430
  misc_feature: Homolog of GI Number: 2511578 NR Desc: multicatalytic endopeptidase
  misc_feature: Homolog of GI Number: 21387013 NR Desc: 20S proteasome beta subunit PBB2
  misc_feature: Homolog of GI Number: 21593337 NR Desc: 20S proteasome beta subunit PBB2
  misc_feature: Homolog of GI Number: 30688785 NR Desc: 20S proteasome beta subunit B
  misc_feature: Homolog of GI Number: 2511576 NR Desc: multicatalytic endopeptidase
  misc_feature: Homolog of GI Number: 24664391 NR Desc: CG3329
MTGSMDLPAKGGFSFDLCRRNNMLEKNGLKVPGFRKTGTTIVGLVFQDGVVLGADTRATEGPIVADKNCEKIHFMAPNIYCCGAGTAADTEAVTDMVSSQLQLHRYATGRESRVVTALTLLKSHLFKYQGHVSAALVLGGVDCTGPHLHTVYPHGSTDTLPFATMGSGSLAAMSVFESKYKEGLTREEGIQIVCEAICAGIFNDLGSGSNVDVCVITKGKTEYLRNHQLPNPRTYASSKGYSFTKGQTEVLSSKVTLLKQKVEVAEGGDAMEE

SEQ ID NO: 9627 - DNA, 986 bp, Zea mays
  misc_feature: Ceres CLONE ID no. 1545134
  misc_feature: Ceres CDNA ID no. 36592471
  CDS (153)..(575): REFERENCED BY SEQ ID NO: 9628
aaaaaaaaaagcaccagaagctcactcactgctcgttgccggctgcccccgcggccccggccagtccatcccctcgctcgctccccaactccagcaggcagatcagatacatccatccattcgcggaccggaaggaaaggaagggttgaactatgagcgccgtggcggtttcgtcgtcgctgaacccggacgcgccgctcttcatcccggcggcgctgctgcaggtggaggacttctcgccgcagtggtgggacctcatcaccaccactgcctggttccgcgaccactggtcccgcgagcgcgcccacctggacgagatggccgagcagatcgacgcggccggcctcctccccgacgacgaggacctcttctacgacgaccagctcgagcagggccccgtcgccgccgcccttaagacagattcggtgctcaaggcgctgaacatgacctccccgaagggcggcggcgacgccccgcgggggttccgggagaaacccaggaacgccgagaagccgaccaagtacgccggcagccccaagagcaacgctccccgcgtgatccaccagcctcgctaggttcgctgggggaactcatcaggaaggctgctgcccctcttgcagccttgctcctggctgccgccgctgtcgtggtctgctctttcaagtcgaagtaacggtggttcgagctagtggatagtgtggctcaactgtagaagttccttttgtatagcaagcaagtaaaaaaaaaaaatgaccaaaaaaatataacaaaatgcagctgtaagtttactgctgctctctaagtcgtgttcagtcatccagtgtgtctagtctagggaaaccccataaaaatggtgaaggtggaatcccatcccagtgtcataattaaggatgcacttcttctgtaagcaaatgtatgatgtacaatggccggccggcagtctaaatgttacaactagctcttcttggtaaaaaaaaaaaaaaaaa

SEQ ID NO: 9628 - protein, 140 aa, Zea mays
  misc_feature: Ceres CLONE ID no. 1545134
  misc_feature: Ceres CDNA ID no. 36592471
  misc_feature: Homolog of GI Number: 21592689 NR Desc: ERD15 protein
  misc_feature: Homolog of GI Number: 20197424 NR Desc: ERD15 protein
  misc_feature: Homolog of GI Number: 8489786 NR Desc: dehydration
  misc_feature: Homolog of GI Number: 33415268 NR Desc: poly
  misc_feature: Homolog of GI Number: 33415266 NR Desc: poly
  misc_feature: Homolog of GI Number: 42571167 NR Desc: dehydration
  misc_feature: Homolog of GI Number: 56481295 NR Desc: early response to dehydration 15
  misc_feature: Homolog of GI Number: 56481331 NR Desc: early response to dehydration 15
  misc_feature: Homolog of GI Number: 56481323 NR Desc: early response to dehydration 15
MSAVAVSSSLNPDAPLFIPAALLQVEDFSPQWWDLITTTAWFRDHWSRERAHLDEMAEQIDAAGLLPDDEDLFYDDQLEQGPVAAALKTDSVLKALNMTSPKGGGDAPRGFREKPRNAEKPTKYAGSPKSNAPRVIHQPR

SEQ ID NO: 9629 - DNA, 509 bp, Zea mays
  misc_feature: Ceres CLONE ID no. 1545300
  misc_feature: Ceres CDNA ID no. 25446582
  CDS (95)..(277): REFERENCED BY SEQ ID NO: 9630
aagccgccgccagaccattcgtttctcgcgagccatcgcttctgtaattctcaggcaccccgctcgatctcatcctaatcggcatccggaagaaatggccaagtcgaagaaccacacggcgcacaaccagtcgttcaaggcgcacaagaacggcattaagaaacccaagcgccaccgccagacctccaccaaggggatggaccccaagttcctgaggaacctgaggtattctaggaagggcaacaaaaagagtggtgaggctgaagctgaggagtaggaaggaaagcatggctttgtttcctctgtttttagctcagttccacctttaggacctggggttttgctaaagatggaacttaagtggtgttactgtatgatggcaaggaccttttgctgccgaaggttatgttttgaagttcatgctaccttttaaagtacggattaccttgtgcctatgttcattatttttgcctttggcagctaaatttggatttcaaaaaaaaaaaaaa

SEQ ID NO: 9630 - protein, 60 aa, Zea mays; identical to SEQ ID NO: 594
  misc_feature: Ceres CLONE ID no. 1545300
  misc_feature: Ceres CDNA ID no. 25446582
  misc_feature (4)..(42): Pfam Name: Ribosomal_L29e PFAM Desc: Ribosomal L29e protein family
  misc_feature: Homolog of GI Number: 34905656 NR Desc: P0475H04.11
  misc_feature: Homolog of GI Number: 7959366 NR Desc: ribosomal protein L29
  misc_feature: Homolog of GI Number: 30679956 NR Desc: 60S ribosomal protein L29
  misc_feature: Homolog of GI Number: 7549643 NR Desc: ribosomal protein L29
  misc_feature: Homolog of GI Number: 7549645 NR Desc: ribosomal protein L29
  misc_feature: Homolog of GI Number: 27764982 NR Desc: At3g06680
  misc_feature: Homolog of GI Number: 12231298 NR Desc: ripening regulated protein DDTFR19
  misc_feature: Homolog of GI Number: 58388930 NR Desc: ENSANGP00000011508
  misc_feature: Homolog of GI Number: 72051829 NR Desc:  similar to 60S ribosomal protein L29
  misc_feature: Homolog of GI Number: 61654674 NR Desc: L29

SEQ ID NO: 9631 - DNA, 487 bp, Zea mays
  misc_feature: Ceres CLONE ID no. 1545680
  misc_feature: Ceres CDNA ID no. 35383455
  CDS (1)..(393): REFERENCED BY SEQ ID NO: 9632
aatcaaggaacagtgcaaactagaagaaacctccgtcatcagcgacctctccccaacggcgccgacgatggcgcaacagcagacgcagctaaccactggctcgggcatcctggatgccgtcccgctcttcgtcgtcatcctcctcgcggcccacgtcctggccctcgtgttctggatgtacaagctggcttccgagaagcaaccaccccggaggaagacacagtgacggcgccgatctacgccatcggcgatccttcgctagcctctttatcggttccattttcatgtgaaccagtaccctccagaacattcaggccgtcaattattcagagatatccatatagtctttcaatttgttttatttatacttattgcattttgggtattgtttgataacaacttagcgatattctatgaatcactatccgtttgggtgataaataaatgttcctagttttagaccatctccgaaaaaaaaaaaaaaaaa

SEQ ID NO: 9632 - protein, 58 aa, Zea mays; identical to SEQ ID NO: 1262
  misc_feature: Ceres CLONE ID no. 1545680
  misc_feature: Ceres CDNA ID no. 35383455

SEQ ID NO: 9633 - DNA, 726 bp, Zea mays
  misc_feature: Ceres CLONE ID no. 1545852
  misc_feature: Ceres CDNA ID no. 36706333
  CDS (230)..(451): REFERENCED BY SEQ ID NO: 9634
gttgattattctagagccagatccgggtaacagattcgagtttgcgcccgccctgttcggcttcaggcattgcaaggtaatctaaatattataggacaggtggtgcagcggtgagggtctcactgagtcaccaggtttcaaagcagccttttcgcatttgcgggggaacgctcatcttggtttatcccttccccaaacctccctcgtgtgggagcctctgacactggatatggggaacactacatctgtgcaagctgaggcttcagattcagcgcagaaacctgccacaacagctcctgcacctgggtcaaagccgaaaaagatctgctgtgcttgcccagatacaaagaagctgagggacgattgcatcgtgcagaatggcgaggatgcctgcggaaagctcatcgaagcccacctgaaatgcctgagagccgaagggttcagcgtctgacgtggtgctccatcatggcaactccacacacctgtttctgcagtaatctgattttgatcatgaacagtgtgatgaataaggacttctggtagagtgatagaaacaactcgcagttttatttctagactggaaggaggaaatcccctgaacattgccagtttgcaagagtttttctatcttttttcaatgcatttagtgccacacatatctgcaattctggataatactttatggagcatatgtatatggaaattgctttaaaaaaaaaaaaaaaa

SEQ ID NO: 9634 - protein, 73 aa, Zea mays; identical to SEQ ID NO: 700
  misc_feature: Ceres CLONE ID no. 1545852
  misc_feature: Ceres CDNA ID no. 36706333
  misc_feature (11)..(73): Pfam Name: COX17 PFAM Desc: Cytochrome C oxidase copper chaperone
  misc_feature: Homolog of GI Number: 50725970 NR Desc: copper chaperone COX17
  misc_feature: Homolog of GI Number: 50915562 NR Desc: putative copper chaperone COX17
  misc_feature: Homolog of GI Number: 14794886 NR Desc: copper chaperone COX17
  misc_feature: Homolog of GI Number: 21536915 NR Desc: cytochrome C oxidase assembly protein
  misc_feature: Homolog of GI Number: 24642093 NR Desc: CG9065
  misc_feature: Homolog of GI Number: 9022433 NR Desc: putative copper chaperone Cox17

SEQ ID NO: 9635 - DNA, 1866 bp, Zea mays
  misc_feature: Ceres CLONE ID no. 1546455
  misc_feature: Ceres CDNA ID no. 25446772
  CDS (187)..(1536): REFERENCED BY SEQ ID NO: 9636
agccctcctcaccactgcccccccattccccggcgcccagcacccggcgccgcaaccgccgcagtccggagcaagatcggtgggtagacggacgggcgacaggcgggcgggcgcggctctgtctgtatctatctgttggtgggagaccggttgtgtcggttaggcggcggcgggtgggaaggaagaatggcggcgggcggcagatccatcgcgtgcgttgccgccgtgctgctcgcggccgcgctgctcctctccgcaccgaccaccacagaggcctacgattcgctggatccaaacggcaacatcactataaaatgggatatcatgcagtggactcctgacggatatgtcgctgttgtcacaatgttcaattatcaacaatttcggcacatcggggcacctggatggcagcttgggtggacatgggcaaaaaaggaggttatatggtcaatggttggggctcagaccactgaacagggtgactgctcaaagttcaagggcaacaccccccattgctgcaagaaagatccaacaattgttgatttacttccaggcactccatacaacatgcaaattgccaattgctgcaaggcaggagttataaatacctttaaccaggacccagcaaatgctgcttcctccttccagatcagtgttggtcttgctggaactaccaataaaactgttaaggtgccgaagaatttcactcttaagactccaggccctgggtacacatgtgggcgtgctattgttggcaggccaacgaagtttttctctgcagatgggcgcagggtaacccaagctctaatgacatggaatgtgacctgcacatattcccaatttcttgctcagaagactccatcctgctgtgtatctctctcatcattttataatgacacaattgtgaactgcccgacatgctcatgtggctgccagaacccaagtgggtcaaactgtgtgaacgaggattcacctaatctacaagccgcaattgatggtcctggtaaatggactggccagcctcttgtacaatgcacttctcacatgtgcccaataagaatccactggcatgtgaagctcaactacaaggaatactggagagtgaaaatcactatcacgaacttcaacttccgcatgaattacacacagtggaacttagttgctcagcatccaaactttgataatatcactcagttgttcagcttcaactacaaaccacttactccatatgggggtggcataaatgatacggcaatgttctggggtgtaaagttctacaatgatttgctgatgcaagccggcaaacttgggaatgtgcaatcagaactgcttctccgcaaggactcacggactttcacattcgaaaagggatgggccttcccacgccgagtgtacttcaatggtgataattgtgtcatgccatctcctgaaaattatccatggctgccgaatgcaagccctctaacaaaacaagcattgacactcccactcttgatattctgggttgccttggctgttctgttggcttatgcatgatgagtgggatcaagatgtttagcaagcttcaagttgatgtcggattccatgaggtgcactgcaacgggatatttattcattcaattccatagcggcacaggagagatgaggcgaagccaagaaaaagtggatgtgtgtgtgtgtgtgtttgtaagttaaagggccaaaatgtatttcttgtctggtagtatatagcagctctacaacactttggtgaacttagttactgcaaattaggcaattacagttgcaccttttgtattttatagcaaacccagacttctattggattctatgactgcccctcttgtagcaaaaaaaaaaaaaaaa

SEQ ID NO: 9636 - protein, 449 aa, Zea mays
  misc_feature: Ceres CLONE ID no. 1546455
  misc_feature: Ceres CDNA ID no. 25446772
  misc_feature: null
  misc_feature: Useful for making plants with altered Lignin content
  misc_feature: Useful for making plants with altered cell wall composition
  misc_feature: Useful for making plants with altered cell wall content and/or composition
  misc_feature (54)..(218): Pfam Name: Phytochel_synth PFAM Desc: Phytochelatin synthetase
  misc_feature: Homolog of GI Number: 20453072 NR Desc: AT5g60920/MSL3_40
  misc_feature: Homolog of GI Number: 32453474 NR Desc: phytochelatin synthase
  misc_feature: Homolog of GI Number: 38230578 NR Desc: phytochelatin synthetase
  misc_feature: Homolog of GI Number: 30090032 NR Desc: phytochelatin synthetase
  misc_feature: Homolog of GI Number: 30090025 NR Desc: phytochelatin synthetase
  misc_feature: Homolog of GI Number: 30090026 NR Desc: phytochelatin synthetase
  misc_feature: Homolog of GI Number: 21553837 NR Desc: phytochelatin synthetase
  misc_feature: Homolog of GI Number: 38194916 NR Desc: phytochelatin synthetase
  misc_feature: Homolog of GI Number: 6690554 NR Desc: phytochelatin synthetase
  misc_feature: Homolog of GI Number: 54287588 NR Desc: putative phytochelatin synthetase
  misc_feature: Utility: pH Useful for making plants tolerant to high pH or low phosphate
MAAGGRSIACVAAVLLAAALLLSAPTTTEAYDSLDPNGNITIKWDIMQWTPDGYVAVVTMFNYQQFRHIGAPGWQLGWTWAKKEVIWSMVGAQTTEQGDCSKFKGNTPHCCKKDPTIVDLLPGTPYNMQIANCCKAGVINTFNQDPANAASSFQISVGLAGTTNKTVKVPKNFTLKTPGPGYTCGRAIVGRPTKFFSADGRRVTQALMTWNVTCTYSQFLAQKTPSCCVSLSSFYNDTIVNCPTCSCGCQNPSGSNCVNEDSPNLQAAIDGPGKWTGQPLVQCTSHMCPIRIHWHVKLNYKEYWRVKITITNFNFRMNYTQWNLVAQHPNFDNITQLFSFNYKPLTPYGGGINDTAMFWGVKFYNDLLMQAGKLGNVQSELLLRKDSRTFTFEKGWAFPRRVYFNGDNCVMPSPENYPWLPNASPLTKQALTLPLLIFWVALAVLLAYA

SEQ ID NO: 9637 - DNA, 2612 bp, Zea mays
  misc_feature: Ceres CLONE ID no. 1546591
  misc_feature: Ceres CDNA ID no. 40041458
  CDS (229)..(2274): REFERENCED BY SEQ ID NO: 9638
aacgggaggagagaagtcgcgtccggaggcaagagccttccgcgccgaacgcggctcgccgctcttcctcctcctccccctctcccgtaggcgtcctcgccgtcctagcgtctgcctttcgacgctgctgccgtggagcgcagatcaaccctgactctgcccgatttcttctctcgttgatgctgaaggtcatttcttacatgttgcagagtgtggaaaaaccttgcaatgaaatggaaaaatgttttgaaggaaatggcaccgctgaggtccacaggcagattctttcaacgccatccttcagctatctgcttattgattttcctacttgtgttgtacaagtacttcttcggctggttcaccctcatcgtcaccacatcacctatcttcctaatcgctggcgtctttcttggaatcgtcctggtgtacggtgaaccgaacaaccctgaaaaagatcatgtctacaaaaaaattgataatactcggagtttgaatatccatgatagcagcaaatctattaggggtgtatatcttcctagaattccgtctggtgaagagagagcgccgaagcacaaaaacagtgttaagaaaattaggaagcagtctcgtggtgtagcctcttcttctgaaccaggatcaagtgaatcaggtggttcagatactgatattgctccaatgttccatgcatttcatcatcttaggtcgggcagcaattcgtcaaattcctctcaagatggtgactctgacagtagcaccgaagatacaacagagaatcaacagggcaacgacggcaggatatcccgcgaggggaaacaacatgttaaagttgttgcatggactgctgatgaccagaagaacataataaaaatcgggtgcttggagattgagcgtaaccaaaggttggagaccctaattgctaggcgtcgggcaaggaaatacgcagacaggaacttggtagagtttggcagcactgaatccttacccactattgaagagctatcaaagttcaatgttcaaattcctgctgtttttgctcctaggaaaaatcctttcgatcttccttacaatgaagataacttcccagattctgctccatctgcactgttggaaacgagatacccatttgatctaccaagtgagcaagcaaacgagagcagctcttatggaggagccaactcaagccatgatgaacctattcccgtagcatgtcatttacagagtgcactgttgaggaggcatgagagcttcactgaaggagcaccattccttagtgactttttgcaagatacacagccttcccgattcagaccatacttcatgactgaaaaaatggctaacgaggaaatgacagatccagttcttgaaggagaaactagtgaaaagagcaactctaaggccagctctgctcaagactcggatagtacttcttcagttgctgaccaagaaagccagaaggatgttctagaggattgctcaaaccaaggacaacaatcttctttcagtcaaacagaggaacatgcacatatagctcggcatgcaagggaggtttctctttcccttgacatggaaccacctgtcttaattagtgattcctctgatgatgacatatcactgtctggtgaacatataaatgattgggaggaagcacaacagagtgaaaattttagtttgtcccagaatacatggcaagaggatcctaatgtcatgcaacaccatcaagaaatagatatcacaagcaatggattgaatcaaatgtcaccacattcgaatgatcttgagttgacgtcgtcatcaactgaaactactgatgatccttttgaagtgaatgacattgaaccaccagctaaggaagtggtggtcgttgatgatacccacgttgtggatcctgtatatgattcaagtccttcgggaagcgagaggcctgcacctactggtttagtaattaacggacctgtcctaaaagatggtcatgcttgtactcttgttgttgaagcaaccatcgaagaagggggttcatcatcaagaatggaggtttcttccagtgaggtagctggacctagtttgagttctgtggagcaaagcgaatccccagagaaagaagcctctgagataagagagcagtccatggttggccatgacgaagcacatggaggttctgtcagccatgctgatccttcagtatctgatataagttctcagccgagtactgaaagttcaacaaatggtgattctggcagtggtgtaacaccatccttcacaaacgcagttctttagtttcttcataaaaaaaatgacagcggcaccgatcgagcatcatcaggttggtcgtcttcagcagtacttcgagctaggcgacttttgtgtggggcgagttcattgctgaggaaaccactgggagggtatatgtttgttgcaggaaatttcttagtgcttcaaagggactaggcaacattagcattattagcactgcactgtaaaaatggctagatatggttgttgcttaatttggccagcactctcgtttgtgaataccttgtggatccgacagtcaattttgtgccgtaaattaattgttaatttgctgcttcgagtaccaaaaaaaaaaaaaaaaa

SEQ ID NO: 9638 - protein, 672 aa, Zea mays
  misc_feature: Ceres CLONE ID no. 1546591
  misc_feature: Ceres CDNA ID no. 40041458
  misc_feature: Homolog of GI Number: 34909190 NR Desc: P0425G02.18
  misc_feature: Homolog of GI Number: 8778556 NR Desc: F22G5.33
  misc_feature: Homolog of GI Number: 68487061 NR Desc: flocculin
  misc_feature: Homolog of GI Number: 4322670 NR Desc: dentin phosphoryn
MAPLRSTGRFFQRHPSAICLLIFLLVLYKYFFGWFTLIVTTSPIFLIAGVFLGIVLVYGEPNNPEKDHVYKKIDNTRSLNIHDSSKSIRGVYLPRIPSGEERAPKHKNSVKKIRKQSRGVASSSEPGSSESGGSDTDIAPMFHAFHHLRSGSNSSNSSQDGDSDSSTEDTTENQQGNDGRISREGKQHVKVVAWTADDQKNIIKIGCLEIERNQRLETLIARRRARKYADRNLVEFGSTESLPTIEELSKFNVQIPAVFAPRKNPFDLPYNEDNFPDSAPSALLETRYPFDLPSEQANESSSYGGANSSHDEPIPVACHLQSALLRRHESFTEGAPFLSDFLQDTQPSRFRPYFMTEKMANEEMTDPVLEGETSEKSNSKASSAQDSDSTSSVADQESQKDVLEDCSNQGQQSSFSQTEEHAHIARHAREVSLSLDMEPPVLISDSSDDDISLSGEHINDWEEAQQSENFSLSQNTWQEDPNVMQHHQEIDITSNGLNQMSPHSNDLELTSSSTETTDDPFEVNDIEPPAKEVVVVDDTHVVDPVYDSSPSGSERPAPTGLVINGPVLKDGHACTLVVEATIEEGGSSSRMEVSSSEVAGPSLSSVEQSESPEKEASEIREQSMVGHDEAHGGSVSHADPSVSDISSQPSTESSTNGDSGSGVTPSFTNAVL

SEQ ID NO: 9639 - DNA, 975 bp, Zea mays
  misc_feature: Ceres CLONE ID no. 1547376
  misc_feature: Ceres CDNA ID no. 36707129
  CDS (108)..(764): REFERENCED BY SEQ ID NO: 9640
agcttagaattcgtgtaccagaaaccccggccctaaccgcgcccgcaccctcgcccttggctcgccggagattaacgctacagccgtaatcacgtaaattccttttcatggagggtgtgggcgcgcggctagggcgcacttcggcgcgctacgggccggcgacgacgttcacgggccatgtcaggaagtggcgcaaggagtgggtaccagtggtcgccgccgccgccgccgccgccgccaacgccaacaccagcgccaacggtggcacgacgtcctccacggggatgggatctggcggaggatcccgcgggaataatcttctcctgtttaagtggaccccggtgaacggggctaacgggggaggaggggatggggagcagcagcagcaggctgagacggccacgagacgccggcggtatgtgccggtttctttaatggaagagcaaaggcaagaatctaccaaatctgatgatgagaacaaggctaatgatggagatccatcttcgaatgaaactgagccatcaaatggaaagactgatatcaatgatacacctatggatgaatctcaggcaacagatgaggatggtcgagattctggtaaaaacggcggtggaacagacctaaatttgaatttaggtttgaaagacccggatggtgataatgaagttgagacatcagagaaacatgtagcggcaaacaatccgcagacagagaatagatccaagaggaaatccgtaacccctgaccttgagatgacaatgtaacccagaaatttcatttgtcttaattttactatttgccatgagcccatgaggtgtgtaacttgggtacgttctcatcgtagaaacatttaagtaaaatcgattacaggacatacaatagtgtgaactgaagaaacctttttttactcgaacatggagaattgtctaaagtcattgtcaaatataatttaattttcaaaaaaaaaaaaaaaaa

SEQ ID NO: 9640 - protein, 218 aa, Zea mays
  misc_feature: Ceres CLONE ID no. 1547376
  misc_feature: Ceres CDNA ID no. 36707129
MEGVGARLGRTSARYGPATTFTGHVRKWRKEWVPVVAAAAAAAANANTSANGGTTSSTGMGSGGGSRGNNLLLFKWTPVNGANGGGGDGEQQQQAETATRRRRYVPVSLMEEQRQESTKSDDENKANDGDPSSNETEPSNGKTDINDTPMDESQATDEDGRDSGKNGGGTDLNLNLGLKDPDGDNEVETSEKHVAANNPQTENRSKRKSVTPDLEMTM

SEQ ID NO: 9641 - DNA, 464 bp, Zea mays
  misc_feature: Ceres CLONE ID no. 1547723
  misc_feature: Ceres CDNA ID no. 25445624
  CDS (2)..(235): REFERENCED BY SEQ ID NO: 9642
acacgcacctagggttttcgcgccgccgccgcagccgcaacaatgccgtcgcacaagaccttccggatcaagaagaagctggcgaagaagatgcgccagaaccgccccatcccctactggatccgcatgcgcactgacaataccatcaggtacaacgccaagcgcaggcactggcgccgcaccaagctcggcttctgagcgtcgggattggccggctgctgcgtcggaaggctagggtctaagagctatcttctgttttatcattgtctctgtttctgtaagctagcaagtgatgctgtgatgcttttattaagattctgatgagtggtgacgttaagagaaaattggcagtactgtgttgtaccccaagattccttgcagcattgctatgctaagtaacgaaccctttatcttattatatatgtagtgttgcagtgattgaggtccaaaaaaaaaaaaaaaaa

SEQ ID NO: 9642 - protein, 51 aa, Zea mays; identical to SEQ ID NO: 2406
  misc_feature: Ceres CLONE ID no. 1547723
  misc_feature: Ceres CDNA ID no. 25445624
  misc_feature (9)..(51): Pfam Name: Ribosomal_L39 PFAM Desc: Ribosomal L39 protein
  misc_feature: Homolog of GI Number: 50915614 NR Desc: putative 60S ribosomal protein L39
  misc_feature: Homolog of GI Number: 50915618 NR Desc: 60S RIBOSOMAL PROTEIN L39
  misc_feature: Homolog of GI Number: 55773789 NR Desc: 60S ribosomal protein L39
  misc_feature: Homolog of GI Number: 57471714 NR Desc: ribosomal protein L39
  misc_feature: Homolog of GI Number: 21618028 NR Desc: putative ribosomal protein L39
  misc_feature: Homolog of GI Number: 24266968 NR Desc: ribosomal protein L39
  misc_feature: Homolog of GI Number: 66934980 NR Desc: ribosomal protein L39
  misc_feature: Homolog of GI Number: 67084113 NR Desc: ribosomal protein L39
  misc_feature: Homolog of GI Number: 58394407 NR Desc: ENSANGP00000020220
  misc_feature: Homolog of GI Number: 54609275 NR Desc: ribosomal protein L39

SEQ ID NO: 9643 - DNA, 1054 bp, Zea mays
  misc_feature: Ceres CLONE ID no. 1547746
  misc_feature: Ceres CDNA ID no. 25402853
  CDS (3)..(776): REFERENCED BY SEQ ID NO: 9644
acttcccccatttcctcgcagtcgcatcgcatccgccctccttgcttcacacgcgcgacgcgatttttctattctttttttgggtggtagttggccaggtcggcgtagggatggagacggcggccgcggcgatgctggaggccggggtggggcggttctcgcgggcgccggcgatggccgcggcgctgctggcggagatgtgggcgccgctggccgtggcgctagcggcgctggccacgctgcccagcctgctgcgccgcctgcaggtcatcgtcctgcgcctccgctcccgcgggaaggaggccatccagttgcacatggggacctactactcgtcctgcgacgacgacgacgacgacgaggacggcgacgaagacgagagctccgacgacgaggtcgacgccagctcctcgggcgacgacggcgaggatctgaagcgaatcgggttctacgagggggccgcggacggcgtcttcccctggggcggcgccgtagtccggacctggcagggcctcccgcgccgcttcacggcctgcgcgtcgggcgtgggagctgtcggcggcgccagcggaggagcgttccctgccgctgtcaggctgtggggcgccggcacggccagcggccagccgtggtgggcctgcagcgccgatgaaggcggctgccgcgacggcgcggccgcggaggtggaccaggtcgtcgtcgggtggcggcgcgagcacgcgtcgcagcagcggcgccggcggcgtgccgttcccctcgctcacacgggcaactgaaacggaacggaacggcaacgggcaaacgaagttacgaagtgggtgtgtcggatttgtgaatatgctgcaggtcgaccagctggagatgccgattccacgattagggcccacctgtaagtgggtgggacgggcccaggccaatgaataaggcgaagggacggtgagagtgccgggaaggggaaggattggttaggcgccgcgccggatcggttggtgacaacattattattttttattagtagtataggaaaggaaaggaaagaaaaaaaaaaaaaaaa

SEQ ID NO: 9644 - protein, 221 aa, Zea mays
  misc_feature: Ceres CLONE ID no. 1547746
  misc_feature: Ceres CDNA ID no. 25402853
  misc_feature: Homolog of GI Number: 66780099 NR Desc: PE
  misc_feature: Homolog of GI Number: 66778899 NR Desc: UvrD/REP helicase
  misc_feature: Homolog of GI Number: 66777776 NR Desc: similar to Methylase involved in ubiquinone/menaquinone biosynthesis
  misc_feature: Homolog of GI Number: 66778264 NR Desc: LigA
  misc_feature: Homolog of GI Number: 66776103 NR Desc: LigA
  misc_feature: Homolog of GI Number: 67985322 NR Desc: Prolyl
  misc_feature: Homolog of GI Number: 66776365 NR Desc: PE
  misc_feature: Homolog of GI Number: 66779334 NR Desc: Glucose
  misc_feature: Homolog of GI Number: 67640326 NR Desc: COG3321: Polyketide synthase modules and related proteins
  misc_feature: Homolog of GI Number: 53768995 NR Desc: COG1409: Predicted phosphohydrolases
METAAAAMLEAGVGRFSRAPAMAAALLAEMWAPLAVALAALATLPSLLRRLQVIVLRLRSRGKEAIQLHMGTYYSSCDDDDDDEDGDEDESSDDEVDASSSGDDGEDLKRIGFYEGAADGVFPWGGAVVRTWQGLPRRFTACASGVGAVGGASGGAFPAAVRLWGAGTASGQPWWACSADEGGCRDGAAAEVDQVVVGWRREHASQQRRRRRAVPLAHTGN

SEQ ID NO: 9645 - DNA, 452 bp, Zea mays
  misc_feature: Ceres CLONE ID no. 1547816
  misc_feature: Ceres CDNA ID no. 36591800
  CDS (136)..(312): REFERENCED BY SEQ ID NO: 9646
aggctacggcggaggcgctggtggaggctacggtcgtggtgcaggtgctggctctggcggcggcggtggttatggtgctggtggcggaggtggaggtggcatcggcggcggtgtctgaatcagcgtctcacatgcatgcatggtggtgcaagctgcaagcagaagcaagtgctcgaactcgctcggtattcccttcgcaggggtgcgtggacgtggagtcgagctataccgatcgatatccgggatcatactctctgcgtagcgaatagcgatcatagtaataacagaataaggatgctgcaatacgtctaatcagtcatcattatacgatggtttatacggtatatatacactgcgttggtagcaagctgaaagattactttgtatcgtactattttaattatattttgtggagataaagaaattattatgagctaaaaaaaaaaaaaaaa

SEQ ID NO: 9646 - protein, 65 aa, Zea mays
  misc_feature: Ceres CLONE ID no. 1547816
  misc_feature: Ceres CDNA ID no. 36591800
  misc_feature: Homolog of GI Number: 33862287 NR Desc: RNA
  misc_feature: Homolog of GI Number: 259443 NR Desc: glycine
  misc_feature: Homolog of GI Number: 3810890 NR Desc: glycine
  misc_feature: Homolog of GI Number: 259451 NR Desc: glycine
  misc_feature: Homolog of GI Number: 77557139 NR Desc: glycine
  misc_feature: Homolog of GI Number: 7636182 NR Desc: glycine
  misc_feature: Homolog of GI Number: 50509489 NR Desc: glycine
  misc_feature: Homolog of GI Number: 47573347 NR Desc: COG0724: RNA
  misc_feature: Homolog of GI Number: 1469223 NR Desc: glycine
MVLVAEVEVASAAVSESASHMHAWWCKLQAEASARTRSVFPSQGCVDVESSYTDRYPGSYSLRSE

SEQ ID NO: 9647 - DNA, 2358 bp, Zea mays
  misc_feature: Ceres CLONE ID no. 1547863
  misc_feature: Ceres CDNA ID no. 35383456
  CDS (266)..(1981): REFERENCED BY SEQ ID NO: 9648
aaaaggctcgcgcacctgcctgcttgcctgcctacctacctgcgttgttgccttcttcgcctcctccccctgtggccgcaccgcagctgctgcggcggcggcagaggtgaacagcttcccgcggccttgtcctgtccggactccggggccgggaccggcagcgcagcgggctcgcgggatctcccgacccccatgcgtcggcctcggtgacagggtttgctaccggagtccatccaactataatgaattagacaaccagtacgtaatggcaacggaagtcaagcaaacttatttttcatggtcacaaggagagtcgactgaacgggatggtcctcaaggagtatctgtatcccagacacttgatcatggttccatttccttcggaagatttgaattagagtcactatcatgggagaagtggtccgtatttactaatgacaggcgcaatgaagaatttggaaaattcaatggtttagtcgctcagaaaaaggcttattttgaagagtattacaagaagatcagggaactaaaggcttcacagcagcaaaaccagcaaactgaacttattctggaatacagcggtgatggtagtgactccagccaaacagcagaagaggagcagggtgctgatcttgaaacccccactggatctggagcagctgttgatgtttatgtggaagaagttccatgtgaaaccacatcggagcatggactgcagtgctataatgaccaaggaaacgaaaattttgatacagaattttcctcatctaatctttcttcgtcaggtggatttctgcagcaaactgaccatgatgttagagttcctgttcgtggtgacaattctaccagtaaactgtatgcggcgccgcagaatgctagttctgttcacgatggtactagaaaaacatatgaagctgcaaggactcctagaaggattattgagaaagattccaggctcagacacagccccaagataataccaaaatccgtcaaagccctttcacaaagtgctatggattacacatttgctagtgagaggcctggttcagtgaagcccaatacaactacgagccagaaggctaagccagtgcaaaggccaaatgcagcaagccagaagacgtctgcctctacagaaaggagcaagcttataggtctcagaagaccttcctcagcaggtgcgcaacggccttctactggagagcgacatgctattgccagggagaattcacaattacctgtggtcgtttccaccccacggcgaccttccactgctgagagacgcccagtcacccgagattgtgcacagaagcaagccaatgtcaccacaccacgccgaccttctacttctgaaagactccccatcaaaagagagactgcagcaaagcataatgatatttccgctgcacgtcgaccctctacaggagagaggcgtgcttttactagagatggtgttctgagaactgatgtgaagacacctagtaaggcaagagcaactgtggctcatccgaagagtgaaatgactacagtgggcaatacgagaaaggctatcactccaaatgcagctagaagtagcaagctggaaacaaaaagcaataactacagactgaagggaccttcaacattggatagccactctactaggtcaaacagaatggacttgcaagtgtctggcaagcagaaatcgagttctgttaaccttcatccaaggaaaattttcagttctactgtcggagaaccagcagttggaaccatttctaggtcaaaaaagaaagagggcgttcaggcgacagtgcaatctcgagcatccacttcaaagagaacaactcctttgcagactggaaacttaaaggcgaggggtccaaatccaccagcaccgccacctccaccacgtcggccatcacgaacgacgaccaaaccaagtgccggtgcctcatcgattggcggaagaaagccaaaggcttcagcaccacaatggcactgatgcagtggaggagagcggaaagcgcttcagtacagtggcccgcagagcatgatggatctgagcgacgtcagtaccggccttcctttgtatggtgtgtactcccgttggcccgtgcagagcagctcccaagtgtagtctcagtacaacccccgttggcccgtcccttcctttgcagagcagcagtctagtgtatgtagtcgcgcgtatcatatcccaccggtgcctagtttcgtcgtccacaaggaacttagaacattgtaaatacctggaaataaatttgcagcttagctctaaagtaaatccagcccaagatttgtgaacatccatgtatgtcattagcaatggaagcccttgtttaccaaaaaaaaaaaaaaaaa

SEQ ID NO: 9648 - protein, 571 aa, Zea mays
  misc_feature: Ceres CLONE ID no. 1547863
  misc_feature: Ceres CDNA ID no. 35383456
  misc_feature: Homolog of GI Number: 50902236 NR Desc: P0408G07.6
  misc_feature: Homolog of GI Number: 72547036 NR Desc: proteophosphoglycan 5
  misc_feature: Homolog of GI Number: 72547023 NR Desc: proteophosphoglycan ppg4
  misc_feature: Homolog of GI Number: 56121882 NR Desc: At5g40700
MATEVKQTYFSWSQGESTERDGPQGVSVSQTLDHGSISFGRFELESLSWEKWSVFTNDRRNEEFGKFNGLVAQKKAYFEEYYKKIRELKASQQQNQQTELILEYSGDGSDSSQTAEEEQGADLETPTGSGAAVDVYVEEVPCETTSEHGLQCYNDQGNENFDTEFSSSNLSSSGGFLQQTDHDVRVPVRGDNSTSKLYAAPQNASSVHDGTRKTYEAARTPRRIIEKDSRLRHSPKIIPKSVKALSQSAMDYTFASERPGSVKPNTTTSQKAKPVQRPNAASQKTSASTERSKLIGLRRPSSAGAQRPSTGERHAIARENSQLPVVVSTPRRPSTAERRPVTRDCAQKQANVTTPRRPSTSERLPIKRETAAKHNDISAARRPSTGERRAFTRDGVLRTDVKTPSKARATVAHPKSEMTTVGNTRKAITPNAARSSKLETKSNNYRLKGPSTLDSHSTRSNRMDLQVSGKQKSSSVNLHPRKIFSSTVGEPAVGTISRSKKKEGVQATVQSRASTSKRTTPLQTGNLKARGPNPPAPPPPPRRPSRTTTKPSAGASSIGGRKPKASAPQWH

SEQ ID NO: 9649 - DNA, 455 bp, Zea mays
  misc_feature: Ceres CLONE ID no. 1548436
  misc_feature: Ceres CDNA ID no. 36707130
  CDS (84)..(275): REFERENCED BY SEQ ID NO: 9650
aaggcatccaagaagctcaaagcaagcagatctaagctccaggcagcgtcgcgacagagtgagtgagtagcacgacaacaacaatggcttccctgaaggccgcgaagcccagcggagttgcggcgcagggcaaggagccggcgcccaagctcagcgagacggcgacgaagccgtcagccgcgaagagcggcggcgttaagaaggctgagcagaagccccgggaaaccaaaaggaaggtgaagagcagcaaacaggcggcggcggccaaaaagtgacgtacagtacgtgtggagtgtaatggagcttccatgcatgagtgaatccatgccatgttatgaatctagtccttcctttcttgtatcttccatgtgacgcggcgtgtgcgtcccctcatgtgtgatgatgccagatgaatactacaaataagacgttgttgtcaaaaaaaaaaaaaaaaa

SEQ ID NO: 9650 - protein, 63 aa, Zea mays; identical to SEQ ID NO: 8892
  misc_feature: Ceres CLONE ID no. 1548436
  misc_feature: Ceres CDNA ID no. 36707130
  misc_feature: Homolog of GI Number: 34911640 NR Desc: P0039G05.22

SEQ ID NO: 9651 - DNA, 680 bp, Zea mays
  misc_feature: Ceres CLONE ID no. 1548490
  misc_feature: Ceres CDNA ID no. 36706334
  CDS (86)..(589): REFERENCED BY SEQ ID NO: 9652
taaaagtgacaaactgaaactgaccatgaagccatgaaacaggctccgctccggcctgtagccgtgaccccccacgaaaaccctaatggcgtcccgcctccttcacctccgccacctcattactcctccctccaccgtccccgccgcttccttctccaccgccgtcagcgcgaccccgcgcgtctccgcgctcgtcgacgagatctgcgggctcaccctcctcgaggcctcttccctggccgatgccctgcgcggccgcctcggcgtcgaccagttgccgccactagctatcctcacgggcggcggcgcaccgctcgtcggcggcggagtaggtcccggcgcggccggcgaggaggcgaaggccaaggaggagaagatggcgttcgacgtgaagctggaggggttcgacgccgcggcgaagctcaagatcatcaaggagctgagggcgttcacgaatctgggtctgaaggaggccaaggatctcgtggagaaggcgcccgccgtgctgaaggctggagttcccaaagaggaggcggagagtatcgccgagaagatgcgggcgctcggcgccaagattgttctcgagtgaacgacgagagctgtgtatgccctcgtttcttgatttgtttcgtgtttcttgtatgaaaaaaagagagaattttggaaaaaaaaaaaaaaaa

SEQ ID NO: 9652 - protein, 167 aa, Zea mays
  misc_feature: Ceres CLONE ID no. 1548490
  misc_feature: Ceres CDNA ID no. 36706334
  misc_feature (100)..(167): Pfam Name: Ribosomal_L12 PFAM Desc: Ribosomal protein L7/L12 C
  misc_feature: Homolog of GI Number: 50582718 NR Desc: putative ribosomal protein
  misc_feature: Homolog of GI Number: 50932695 NR Desc: putative 50S ribosomal protein L12
  misc_feature: Homolog of GI Number: 17104653 NR Desc: putative ribosomal protein
  misc_feature: Homolog of GI Number: 34913132 NR Desc: ribosomal protein
  misc_feature: Homolog of GI Number: 50906015 NR Desc: ribosomal protein L12
  misc_feature: Homolog of GI Number: 66849485 NR Desc: 60S ribosomal protein L7/L12 precursor
  misc_feature: Homolog of GI Number: 21593662 NR Desc: ribosomal
  misc_feature: Homolog of GI Number: 72086543 NR Desc:  similar to 39S ribosomal protein L12
  misc_feature: Homolog of GI Number: 59858329 NR Desc: mitochondrial ribosomal protein L12
MASRLLHLRHLITPPSTVPAASFSTAVSATPRVSALVDEICGLTLLEASSLADALRGRLGVDQLPPLAILTGGGAPLVGGGVGPGAAGEEAKAKEEKMAFDVKLEGFDAAAKLKIIKELRAFTNLGLKEAKDLVEKAPAVLKAGVPKEEAESIAEKMRALGAKIVLE

SEQ ID NO: 9653 - DNA, 682 bp, Zea mays
  misc_feature: Ceres CLONE ID no. 1548514
  misc_feature: Ceres CDNA ID no. 36592060
  CDS (242)..(439): REFERENCED BY SEQ ID NO: 9654
catttcgtcgaaaccgtgtctctcgtgtttcataatggcaattgtctctcccacgagaaggcccgtgcgggtgcgctttgctcctctccccgcgtgctctccctctctctcgcgcgcgcggcgacgactcggctagtcggctaccgccgccgccccctacgccagcttcccagctcttcgtcaggcccttctccgtcaacgagcacccagcacatatcctgagcccctccacacctcaacgatggcgggattcagaagccttgcacccaagaccaggaacctggtggtggctgggggcctgtcggccttcgtgctcggggtctactactacaccatgagagccgtgggaggcacggacgagctgcaggtggcgatcgacaagtttgaggagatgaagaagaaggacgctgccagaaactccagcacaggaggatcgtaaacgcggcgcccttctcgtctctgtactgaacctggatctgcaggctgacatgatacggtagtcaagtcgctcagtaggccaagaacatgcgtgcctctactgtgcaataaataatgtgtgatactctttatcagatagagcttggcagcttgtgttttaaggagagatgtacactcgagtgtttttgtcctatgatataatagtggtcgcaatgtctaaatttccctaaaaaaaaaaaaaaaa

SEQ ID NO: 9654 - protein, 65 aa, Zea mays
  misc_feature: Ceres CLONE ID no. 1548514
  misc_feature: Ceres CDNA ID no. 36592060
MAGFRSLAPKTRNLVVAGGLSAFVLGVYYYTMRAVGGTDELQVAIDKFEEMKKKDAARNSSTGGS

SEQ ID NO: 9655 - DNA, 3059 bp, Zea mays
  misc_feature: Ceres CLONE ID no. 1548737
  misc_feature: Ceres CDNA ID no. 40041459
  CDS (256)..(2778): REFERENCED BY SEQ ID NO: 9656
aatccaccgtcatcattagcatcgtctcctctcgttagcagtcgcaagtagccagcagtccagcacacgactccgccgccccttccgctccgtcctcccctcctctccgctctccatcctggccgggcccacccggcattcttgaacttccccttcccgcatcaaatcccctacccgtgccgtcgctgcgcccgcgctgcgtgcccgaattttcgccgtaatccggctggtttttcccgtgcgcagcgggccgtaatggcgctgtccgcgtccgcggcgtcggccggccgggggtcgcgggcggagaaggtgaggaggatcttcgagcgcttcgacaccaacggggacggcgggctagaccggaacgagatggccgccctcgtcgtcgccgtcaacccgcgggtcaagttcagcgaggaccagatctccgccatcctggacgaggtgttccacacctacggcgaattcatcctccccgacggcaggggcctctccctactagggctgcttcgcacctacgatgacggcgccggggacgtcgaccgcgactttctcgcgctctccctacccgccgtcgactccgacgcctcctccccggacatcgccgcaggggacgctgccgcccactcctccccgccctccggggctgccgccgccgcatcgctgctcgacgaccacgccaagccgctcggcgccggcggcgctgcgccgtcggtcagctcccgcgccgccgtcgccgcgccggcttgggcgacctcgcccaaccacggcatcgccttcgactcctcctggggactcctcgacgacctggagatactcgtcaagcgcctccgctcaaagcagctgcggaagggctccatcgacggcgccggcaacaacaacttcgactccttctccgaggccgggtggtccagggagatctccggcgcggcggattccgcatccaccgccgctccgtgggacgagacgagccgcgactacctcaccttcgtcaaggaactcgccgtgctccgcacgcgcgccgacgcctcccgctcgcgcgaggaggcattcgacaaccacatggtcatcggccgggcgctttctgagcaccgcctcttccgagacgccctagccagcttccgccgcgcctgtgagctgcagcccactgacgtccgtccccacttccgcgcggggaactgcctgtacgccctcggtcgccatgcagaagccaaggaggagtacctcctcgcccttgaggccgcggaggctggcggctcacagtccgcggacattctcccgcagatccatgtcaaccttggtattgccatggaggccgaggggatggtacttggtgcctgtgagcattaccgagaagctgccatactgtgtccatctcatgccagggcactcaagctcctggggagcgctctctttggcgttggggagtaccgagctgctgagaaggcactggaggaggccatcttcttgaaggaagactatgctgatgcgcactgtgaccttgggtccgctctgcatgcagtaggggaggatgaccgtgccatccaggagtttcagacagcaattgatcttaaacctggccatgttgatgccttatataatcttggtggattgaacatggacgcaggtcgttttgtacgggctgcggagatgtatactcgtgtgctgagcatccgaccaaaccattggcgtgcacagctaaacaaggcagtggctttgcttgggcagggtgagtctgaggaggccaagaaggcactcaaggatgcgtttaagatgacacaaagggtggaagtgtatgatgctatctcacatttgaagacattgcaaaagaagaagccaaagccttccaaaggaaaagatgacggtcaaggggagcaggcttatgttgttgtggaggcatccaagttcaagagggttgggaggaagactaccttgcggcaggatttggccaatgctctagatataagggcctttgagaggatgacaaaactaggtcactgcgatgtggagcttcttagaaaagagatgaatgagactgatgtccctatatcttactcgggcaccggcatccctgagaagtcaatacgcaaagcagctcttgaggttattctccgcaggctcctctcttttctcaagccagatacctttcagggtgctattaaggcaatcaacgaaagaattctctctgtccttgatgcttctggctctggtcgtgttgatctgggcatgttcttcgccaccattgctccaatctgttctggccctgtggatatgcgcaagcgtatcgtctttgatgcactcctttggcgtcctgctagcgaaggcagcaatggccagataaggaggagtgatgcgttaacctacattaagcttcttcgagctgtttatatacccacgcatggggctagtgacatgctcgaaatgcatggggagtctgaccctaccatggtatcatacacggaattcttagagatgttcaatgacccagattggggatttgggatcctgagcactctggtgaagcttgaggagagtgatcacatacgtcacggtcgccacacatgctccatctgcctgtaccctatcattggttcacggtttaaggaaacaaaacactccttcagcctgtgcaaccggtgctacagtgaagggaaggttccgtcagcgttcaagttggaggagtacaggttcaaagaatacggtaacgaatccgaggccctcattgataagtgcatgtgcttcaatttgcattctaagaagctggaagctgatgcttgatcattcaaactttgatctcgagtgctcaagcatgaatctgtgtatttacctaggtgcaaagatgtctagttagctctcccactcccttgtaaacaaagttgctgccattcagggtttctctagatgtgtcccggttactaatatatgaccgtaatgtgttagctgttgttttaagtgtacgggaacgagtaaatgtgaattccatacactctgtcgccccagtccaattcagccttgttgaaccttgcatatttttgtgtgagcaaaaaaaaaaaaaaaaa

SEQ ID NO: 9656 - protein, 840 aa, Zea mays
  misc_feature: Ceres CLONE ID no. 1548737
  misc_feature: Ceres CDNA ID no. 40041459
  misc_feature (18)..(46): Pfam Name: efhand PFAM Desc: EF hand
  misc_feature (300)..(328): Pfam Name: TPR_1 PFAM Desc: Tetratricopeptide repeat
  misc_feature (444)..(477): Pfam Name: TPR_2 PFAM Desc: Tetratricopeptide repeat
  misc_feature (478)..(497): Pfam Name: TPR_4 PFAM Desc: Tetratricopeptide repeat
  misc_feature (764)..(807): Pfam Name: ZZ PFAM Desc: Zinc finger
  misc_feature: Homolog of GI Number: 2388582 NR Desc: Contains similarity to Rattus O
  misc_feature: Homolog of GI Number: 28973559 NR Desc: putative O
  misc_feature: Homolog of GI Number: 16225446 NR Desc: O
  misc_feature: Homolog of GI Number: 72383519 NR Desc: TPR repeat
  misc_feature: Homolog of GI Number: 67987177 NR Desc: 4Fe
  misc_feature: Homolog of GI Number: 23123830 NR Desc: COG0457: FOG: TPR repeat
  misc_feature: Homolog of GI Number: 188864 NR Desc: mucin
  misc_feature: Homolog of GI Number: 186396 NR Desc: mucin
  misc_feature: Homolog of GI Number: 4505285 NR Desc: mucin 2
  misc_feature: Homolog of GI Number: 33864077 NR Desc: TPR repeat
MALSASAASAGRGSRAEKVRRIFERFDTNGDGGLDRNEMAALVVAVNPRVKFSEDQISAILDEVFHTYGEFILPDGRGLSLLGLLRTYDDGAGDVDRDFLALSLPAVDSDASSPDIAAGDAAAHSSPPSGAAAAASLLDDHAKPLGAGGAAPSVSSRAAVAAPAWATSPNHGIAFDSSWGLLDDLEILVKRLRSKQLRKGSIDGAGNNNFDSFSEAGWSREISGAADSASTAAPWDETSRDYLTFVKELAVLRTRADASRSREEAFDNHMVIGRALSEHRLFRDALASFRRACELQPTDVRPHFRAGNCLYALGRHAEAKEEYLLALEAAEAGGSQSADILPQIHVNLGIAMEAEGMVLGACEHYREAAILCPSHARALKLLGSALFGVGEYRAAEKALEEAIFLKEDYADAHCDLGSALHAVGEDDRAIQEFQTAIDLKPGHVDALYNLGGLNMDAGRFVRAAEMYTRVLSIRPNHWRAQLNKAVALLGQGESEEAKKALKDAFKMTQRVEVYDAISHLKTLQKKKPKPSKGKDDGQGEQAYVVVEASKFKRVGRKTTLRQDLANALDIRAFERMTKLGHCDVELLRKEMNETDVPISYSGTGIPEKSIRKAALEVILRRLLSFLKPDTFQGAIKAINERILSVLDASGSGRVDLGMFFATIAPICSGPVDMRKRIVFDALLWRPASEGSNGQIRRSDALTYIKLLRAVYIPTHGASDMLEMHGESDPTMVSYTEFLEMFNDPDWGFGILSTLVKLEESDHIRHGRHTCSICLYPIIGSRFKETKHSFSLCNRCYSEGKVPSAFKLEEYRFKEYGNESEALIDKCMCFNLHSKKLEADA

SEQ ID NO: 9657 - DNA, 2132 bp, Zea mays
  misc_feature: Ceres CLONE ID no. 1549255
  misc_feature: Ceres CDNA ID no. 35383457
  CDS (292)..(1722): REFERENCED BY SEQ ID NO: 9658
atccaacctcgcaagctagctagctactaccactcatgcccgcctcctacgctcctgctccctactcctcctctccctttcggctcccgatcccttcccgcgcgcgcacgtcgtccttcccgattcgctccgacgacgcaccgccgtgccgtcggctggatatagctgagctgcccgacccagcgcgccattaaaagacctctttcctcctcgatcgcggccgtgccaagcgcatagaccagcacgtaccacacgtttacgtgaacgaccgaccggcgcattccatcgtccatgggcaaccgcaagaagctggtccacttcctccgcgtcgacccggcggcggcggcggcctccgccctctcctcccctaggtccttctccgacgacgacggctacagctcctcctccttctcctcctcctcgccgtcgcggtacagcccgcccaagtcgccgtgggcgcgcctcccgggcctcggcggcgccgacgccgccgccgcgacaggcctcatcgcgtcgctcgtcaaggaggacggcaaggtctactcgctggcggcggccggggacgtgctgtacaccggcacggactcggagaacgtgcgtgtgtggcgggaccggcgcgagctcgcggggttccggaccggcagcggcctcgtcaaggccatcgtggtcgccgccgacggccgcatcttcacgggccaccaggacggcaaggtccgggtgtggcgcgccgacgccgccgaccccgccgtgcaccgccgcgtggggtcgctcccgccgctcggggacctcctggtcagctccgtcaacccgtccagctacgtgcgctcgccgcgcggcgggaggggccggggccggcgccgcgtcgccgtctggctccgccactcggacgccgtgtcgtccctcagcctcgacgagggcgccggcctgctctactcggcctcctgggaccgcaccttcaaggcgtggcgcgtgtcagactaccggtgcctcgagtccgtgcccgcgcacgacgacgccgtcaacacggtcgccgcggccgggttcggcggcctcgtgctcaccggctccgccgacgggaccgtcaaggtgtggcggcggcgggaggcggcggccgaccggacgagccacgtcctgcagagggtgctccgggagggcgacggcgcggtgaccgccatcgcggcgtgccccgaggcccgcgccgtgtacgtgggctcctccgacgggctggtcacgtgctggcggtgggggctggacgtggacgcccagccgacgcacgcgggcgtgctggccggacacgggatgggcgtgctgtgcctcgccgtgtccgggcgcgtcgtcgtcagcggctcggccgacgggacgctctgcgtgtggcgccgcgacgacgacgacgacgagcaaaagggacacgcccgcctcgccgtgctcgtggggcacacggggcccgtcaagtgcgtcgcagtggccgcggacgaggactgctacgacgcggacggcgagcggcggttcgtggtgtacagcggcagcctggacgggtcggtcaaggtgtggcgtctgtcggaggagcgcgcgctggagccgcccgcggtagagacaacaacgcctccgttgatggcggcactgaggcagtcggagacatggatgccccggccccgaacagcacagcttccgtcaccggtgcaaacgtgggcgccggagctgaagggcgtggcagctgcatgagcacgattgcacgaagatgctaccggtcgattagctgcacctgcactgcatgaggtcgtgcgcgtgtgcatgcgtgcaagaatgtgccgcgaacacgtgtgctgtaggagagtgtgtacatatacctagaacatacggataccgtatggtattggtaactacgcctagctagtatgaattttgaggaggattaaatcaagtgtggagtgccgggttttttttcaaaaactaaaagaaaaaaaaatcaagtgtgtggtgatctgatacggccgggtggtttgatgaggataaaaacgagcggttggtctgatttgaaaacgagaggtgtcttctacaatgtcaaaatcaaattaatgggcaaggaaaacgatttcgtgttaaaaaaaaaaaaagaaaaaaaaaaaaaaaaa

SEQ ID NO: 9658 - protein, 476 aa, Zea mays
  misc_feature: Ceres CLONE ID no. 1549255
  misc_feature: Ceres CDNA ID no. 35383457
  misc_feature (109)..(145): Pfam Name: WD40 PFAM Desc: WD domain
  misc_feature: Homolog of GI Number: 37718784 NR Desc: putative WD
  misc_feature: Homolog of GI Number: 42565801 NR Desc: transducin family protein / WD
  misc_feature: Homolog of GI Number: 53850519 NR Desc: At2g26490
  misc_feature: Homolog of GI Number: 50918519 NR Desc: putative WD repeat
  misc_feature: Homolog of GI Number: 17979259 NR Desc: At1g49450/F13F21_11
  misc_feature: Homolog of GI Number: 50912615 NR Desc: transducin family protein / WD
  misc_feature: Homolog of GI Number: 66778899 NR Desc: UvrD/REP helicase
  misc_feature: Homolog of GI Number: 66779508 NR Desc: Aspartate/glutamate/uridylate kinase
  misc_feature: Homolog of GI Number: 67984658 NR Desc: type II secretion system protein E
  misc_feature: Homolog of GI Number: 66780099 NR Desc: PE
MGNRKKLVHFLRVDPAAAAASALSSPRSFSDDDGYSSSSFSSSSPSRYSPPKSPWARLPGLGGADAAAATGLIASLVKEDGKVYSLAAAGDVLYTGTDSENVRVWRDRRELAGFRTGSGLVKAIVVAADGRIFTGHQDGKVRVWRADAADPAVHRRVGSLPPLGDLLVSSVNPSSYVRSPRGGRGRGRRRVAVWLRHSDAVSSLSLDEGAGLLYSASWDRTFKAWRVSDYRCLESVPAHDDAVNTVAAAGFGGLVLTGSADGTVKVWRRREAAADRTSHVLQRVLREGDGAVTAIAACPEARAVYVGSSDGLVTCWRWGLDVDAQPTHAGVLAGHGMGVLCLAVSGRVVVSGSADGTLCVWRRDDDDDEQKGHARLAVLVGHTGPVKCVAVAADEDCYDADGERRFVVYSGSLDGSVKVWRLSEERALEPPAVETTTPPLMAALRQSETWMPRPRTAQLPSPVQTWAPELKGVAAA

SEQ ID NO: 9659 - DNA, 1943 bp, Zea mays
  misc_feature: Ceres CLONE ID no. 1549363
  misc_feature: Ceres CDNA ID no. 40041460
  CDS (197)..(1774): REFERENCED BY SEQ ID NO: 9660
aatccttaaccgtcccacgcgaccgtggactccgtcatcgcattcgtcaccacctctgccgcctcgcggccgccgcattcatcccctgcgattacaaaaccctacgatagttctccaccaattcctctaatccctggtcgctaggtagttcctgcgcctccatcccgatcccctgtctgatccaatcgtaatcaggatgctgccaggatcagagccggcggccggcggcaccggtatgttcgtgccggcggcgacggcgggcacggtgctctgctgcatgtgtggtgtgtccatgcagcccaacccggccaacatgtgcgcgcgctgcctgcgcgctcgcgtcgacatcaccgaaggcgtcccgcgccacgccgccgtggtctactgccccgactgttcctcctacctccagccgccgcggtcctggctccgcgccacacccgagtcgcccgagctcatgcagatcctgctccgccgagtcaaccgcccactcgcgcggctacgcgtctccctctccggcgccgagttcgtcttctccgagccccactctaagcgcctccgcctcaacctccgcctccgccgcgaggtgctccacggcatcgtcctcgagcagacgcaccccgtcgagttcgtcgtccacgaccgactctgcgactcctgctcccgcgcgcaggccaaccccgatcagtgggtcgccgtcgtccagctccgccagcacgtgccccaccgccgcaccttcctctacctcgagcagctcctcctaaaacacggccaggcttccctagcgatccgagtcgcggcggcccccggcggcctcgacttcttcttcggctcgcgttcccatgccgcccgcctggtcgacttccttgccaccgtcgctcctatccaaactcagacagcgaagcagctcgtctcgcacgacaccaagagcagcgtctacaactacaagtacaccttttcggtcgatatctgccctatctgccgtgaggacctcatcgcgctcagtccccaggcgtcccgggacatgggtggccttggcccgctcgtgctctgtgtcaaggtcacaaatgccattgctcttcttgatcccctcacgctgcgagtgcaccacctggaggagaaaaaatacagggtctataatttcaaggcaactctcaccagcaagcagcttgtggagtacattgtgctcgacatagaacaagaatcgcctgaaatttctattgatgggtctcgataccaattggcttatgctcaggttgcccgggtgtcagatttcgggaagaatgacaccatctttactgtgaggacgcatcttgggcacctgctgaaccctggtgatcatgcccttgggtatgatctctatggtgccaacctaaatgatgatgacatgaacacagctatgactcggtacagcttacctgaggcggttcttgtcaagaagagctacgagaagaggcctcgcacacggcgatggaagcttaagaggttgccggtggaggaagatgctgcaaataaggccaagggtgaggaagagaagacgctagatgagtacgaggctttcctcagggatttggagctggacccagggatgcggttcggggtgaatctgtacaagaatgaggactataggtctgagatggcatcaacagttggtgatgatatccctacggtgtcaatcgaggagctgattgaggacttgacccttggtgacaatgaggatgatgaaggggaagaagctgtggaaggcaacactcatgctggaatggtggaatgagcctcatgctggaatggtagaatgatcatatatgttttttttcgttgttactggtacaagttagaattttggtggtactgcttaagtttataattctgctgtttctccaaatcaactttatttcaacccttatcatgcattggaggtgttacaaaaaaaaaaaaaaaaa

SEQ ID NO: 9660 - protein, 525 aa, Zea mays
  misc_feature: Ceres CLONE ID no. 1549363
  misc_feature: Ceres CDNA ID no. 40041460
  misc_feature (26)..(258): Pfam Name: NMD3 PFAM Desc: NMD3 family
  misc_feature: Homolog of GI Number: 15810403 NR Desc: putative nonsense
  misc_feature: Homolog of GI Number: 22136400 NR Desc: putative nonsense
  misc_feature: Homolog of GI Number: 34905738 NR Desc: OJ1294_F06.10
  misc_feature: Homolog of GI Number: 49115525 NR Desc: MGC80914 protein
  misc_feature: Homolog of GI Number: 74003699 NR Desc:  similar to NMD3 homolog
  misc_feature: Homolog of GI Number: 55621440 NR Desc:  similar to CGI
  misc_feature: Homolog of GI Number: 76607830 NR Desc:  similar to NMD3 homolog isoform 1
  misc_feature: Homolog of GI Number: 62643568 NR Desc:  similar to NMD3 homolog
  misc_feature: Homolog of GI Number: 66359062 NR Desc: NMD3p like protein involved in nonsense mediated decay
MLPGSEPAAGGTGMFVPAATAGTVLCCMCGVSMQPNPANMCARCLRARVDITEGVPRHAAVVYCPDCSSYLQPPRSWLRATPESPELMQILLRRVNRPLARLRVSLSGAEFVFSEPHSKRLRLNLRLRREVLHGIVLEQTHPVEFVVHDRLCDSCSRAQANPDQWVAVVQLRQHVPHRRTFLYLEQLLLKHGQASLAIRVAAAPGGLDFFFGSRSHAARLVDFLATVAPIQTQTAKQLVSHDTKSSVYNYKYTFSVDICPICREDLIALSPQASRDMGGLGPLVLCVKVTNAIALLDPLTLRVHHLEEKKYRVYNFKATLTSKQLVEYIVLDIEQESPEISIDGSRYQLAYAQVARVSDFGKNDTIFTVRTHLGHLLNPGDHALGYDLYGANLNDDDMNTAMTRYSLPEAVLVKKSYEKRPRTRRWKLKRLPVEEDAANKAKGEEEKTLDEYEAFLRDLELDPGMRFGVNLYKNEDYRSEMASTVGDDIPTVSIEELIEDLTLGDNEDDEGEEAVEGNTHAGMVE

SEQ ID NO: 9661 - DNA, 2681 bp, Zea mays
  misc_feature: Ceres CLONE ID no. 1549712
  misc_feature: Ceres CDNA ID no. 36698999
  CDS (140)..(2512): REFERENCED BY SEQ ID NO: 9662
atccgcaaaacaaaacaccaacctttagcaccaggcaaaccaaacactaggccaacgcaattctctagagcactgtaggctctagttctccagaggcccgccacaaccacaagccaaggccacagccagtgccctcgccatggctcccaacctcagcaagaagacgcctgctggcctcctcggcgacgaggtggccccggtggagggactcaagccgtcgcggttcacccttaagggcaaggacctggccgtggacgggcacccggtcctgctggacgtgccggccaacatccgtctcaccccggcgtcgacgctcgtgcccgccgcggacgtccccgcagcgggcggcggcagcttcctcggcttcgacgcggcggcggccgagagccggcacgtggtgcccgtcggaaagctccgtgacattcggttcatgagcatcttccgtttcaaggtgtggtggacgacgcactgggtgggggacagcggcagggacgtggagaacgagacgcagatgatggtgctcgaccgctccgccggcgagcccgtcggcggcggccgaccctacgtgctgctgctccccatcatcgagggctcgttccgggcctgcctcgaggccgggaaggtggaagactacgtggacctgtgcgtggagagcgggtcgtcggcggtgcgcggcgccgcgttccggagctcgctgtacctgcacgcgggcgacgacccgttcgagctcgtcgcggacgccgtcagggtggtccgcgcgcacctgggcacgttccggaccatggaggagaagacgccgccgccgatcgtggacaagttcgggtggtgcacgtgggacgccttctacctcaaggtgcacccggagggcgtctgggagggcgtgcgccgcctggcggagggcggctgcccgccggggctggtgctcatcgacgacggctggcagtccatctgccacgacgaggacgacccgaacagcggcgaggagggcatgaaccgcacctccgccggcgagcagatgccctgccgcctcatcaagttccaggagaaccacaagttcagggagtacaagcagggcgggatgggcgcgttcgtgcgggagatgaaggcggcgttccccaccgtggagcaggtgtacgtgtggcacgcgctgtgcgggtactggggcggcctccgccccggcgcgcccggcctgccgcccgccaaggtggtggcgcccaagctctcccccggcctgcagcgcaccatggaggacctcgccgtcgacaagatcgtcaacaacggtgtcggcctcgtcgaccccaagcgcgcgcacgagctctacgatggtttgcactcccacctccaggcctccggcatcgacggcgtcaaggtcgacgtcattcacttgctggagatgctgtgcgaggagtacggcggccgtgtcgagctggccaaggcctacttcgccgggctgacggcgtcggtgcggcggcacttcggcggcaacggcgtgatcgcgagcatggagcactgcaacgacttcatgctgctgggcacggaggcggtggcgctgggccgcgtgggcgacgacttctggtgcacggacccctccggcgaccccaacggcaccttctggctgcaggggtgccacatggtgcactgcgcctacaactcgctgtggatgggcaacttcatccacccggactgggacatgttccagtccacgcacccctgcgccgccttccacgccgcgtcccgcgccatctccggcgggcccatctacgtcagcgactcggtggggcagcacgacttcgcgctgctccgccgcctggcgctccccgacggcaccgtcctccggtgcgaggaccacgcgctgcccacgcgcgactgcctcttcgccgacccgctccacgacggccggaccgtgctcaagatctggaacgtgaaccgcttcgccggcgtcgtcggcgccttcaactgccagggcggcgggtggagccccgaggcgcggcggaacaagtgcttctcggagttctccgtgcccctggccgcgcgcgcctcgccgtccgacgtcgagtggaagagcggcaaggcggggccaggcgtcagcgtcaaggacgtctcccagttcgccgtgtacgcggtcgaggccaggacgctgcagctgctgcgccccgacgagggcgtcgacctcacgctgcagcccttcacctacgagctcttcgtcgttgcccccgtgcgcgtcatctcgcatgagcgggccatcaagttcgcgcccatcggactcgccaacatgctcaacaccgccggcgccgtgcaggcgttcgaggccaagaaagatgctagcggcgtcacggcagaggtgttcgtgaagggcgcaggggagctggtggcgtactcgtcggcgacgcccaggctctgcaaggtgaacggcgacgaggccgagttcacgtacaaggacggcgtggtcaccgtcgacgtgccgtggtcggggtcgtcgtcgaagctgtgttgcgtccagtacgtctactgagccggacgggccgatgactctgcgtctctgctccctgctggcctgctcaggacgcaataatctaatgtttagagcttaccaggttttacagctctatcagtttacttttgtttttctgctcttcgttttttaagaattatttctattgtgtgaaaaaaaaaaaaaaaaa

SEQ ID NO: 9662 - protein, 790 aa, Zea mays
  misc_feature: Ceres CLONE ID no. 1549712
  misc_feature: Ceres CDNA ID no. 36698999
  misc_feature (29)..(774): Pfam Name: Raffinose_syn PFAM Desc: Raffinose synthase or seed imbibition protein Sip1
  misc_feature: Homolog of GI Number: 29838631 NR Desc: alkaline alpha galactosidase II
  misc_feature: Homolog of GI Number: 6634701 NR Desc: galactinol
  misc_feature: Homolog of GI Number: 6706423 NR Desc: imbibition protein homolog
  misc_feature: Homolog of GI Number: 55770559 NR Desc: putative alkaline alpha galactosidase I
  misc_feature: Homolog of GI Number: 15292677 NR Desc: putative imbibition protein homolog
  misc_feature: Homolog of GI Number: 34896196 NR Desc: putative raffinose synthase
  misc_feature: Homolog of GI Number: 21038869 NR Desc: putative stachyose synthase
  misc_feature: Homolog of GI Number: 4106395 NR Desc: raffinose synthase
  misc_feature: Homolog of GI Number: 18181865 NR Desc: raffinose synthase
  misc_feature: Homolog of GI Number: 20148633 NR Desc: raffinose synthase protein
MAPNLSKKTPAGLLGDEVAPVEGLKPSRFTLKGKDLAVDGHPVLLDVPANIRLTPASTLVPAADVPAAGGGSFLGFDAAAAESRHVVPVGKLRDIRFMSIFRFKVWWTTHWVGDSGRDVENETQMMVLDRSAGEPVGGGRPYVLLLPIIEGSFRACLEAGKVEDYVDLCVESGSSAVRGAAFRSSLYLHAGDDPFELVADAVRVVRAHLGTFRTMEEKTPPPIVDKFGWCTWDAFYLKVHPEGVWEGVRRLAEGGCPPGLVLIDDGWQSICHDEDDPNSGEEGMNRTSAGEQMPCRLIKFQENHKFREYKQGGMGAFVREMKAAFPTVEQVYVWHALCGYWGGLRPGAPGLPPAKVVAPKLSPGLQRTMEDLAVDKIVNNGVGLVDPKRAHELYDGLHSHLQASGIDGVKVDVIHLLEMLCEEYGGRVELAKAYFAGLTASVRRHFGGNGVIASMEHCNDFMLLGTEAVALGRVGDDFWCTDPSGDPNGTFWLQGCHMVHCAYNSLWMGNFIHPDWDMFQSTHPCAAFHAASRAISGGPIYVSDSVGQHDFALLRRLALPDGTVLRCEDHALPTRDCLFADPLHDGRTVLKIWNVNRFAGVVGAFNCQGGGWSPEARRNKCFSEFSVPLAARASPSDVEWKSGKAGPGVSVKDVSQFAVYAVEARTLQLLRPDEGVDLTLQPFTYELFVVAPVRVISHERAIKFAPIGLANMLNTAGAVQAFEAKKDASGVTAEVFVKGAGELVAYSSATPRLCKVNGDEAEFTYKDGVVTVDVPWSGSSSKLCCVQYVY

SEQ ID NO: 9663 - DNA, 1040 bp, Zea mays
  misc_feature: Ceres CLONE ID no. 1549927
  misc_feature: Ceres CDNA ID no. 25447080
  CDS (216)..(614): REFERENCED BY SEQ ID NO: 9664
agtacgcccatgactcagccaccgcgttcctcgaacgtgtcgtccgtgtagacccgtcccacgcaacacctcagcgatccaccgccctccctcttcgctaaagccgtaatccgaaatcccgcccccagacccagatcgcacgacgcaaccgatccccaaatcttcccagttcccccctcccgctcgacccagatcgaggcctcgatccaccggccatggcgctggagtgggtggtgctgggctacgcggcgggcgcggaggcggtcatgctgctgctgctgacgctgccggggctcgacggcctgcgccggggcatggtctccgtggtgcggagcgcgctcaagcccatgatgtccgtggtgcccttctgcctcttcctgctcatggacatctactggaagtacgagacgcggcccacctgcgacgacgagcacgcctgcaccccctccgagcacctccgccaccagaagtccgtcatgaagtcgcagcgcaacgcgctcctcatcgccgccgcgctcctcctctactggatcctcttctccgtcacccagctcgtcgtcaggctcgaccagatgcagcagcgcgtcgacaagctcaagaagcgcgacgactgatggggctcgcgttcgcgccttccccgcgtccacccggtggtctcgttcttccctctgcctcgtactttctgtttttttttttccatgttggagtgcggatgtcttagatctcgatcgtaatttgaggcatggtgcttccttttgcccttaccgtcttcagataaaaagaacaacgctctttgaaatgatgatatatttaggatgtttggacaaatggtatcgtaattgattgtgttcaccaatgagttgattggtttcacttgagatacaacgagatatgggtctagttgtcatccttgaaatattggttattagctactagtgctgttttgataatgcgactgagcttatgttgtaattgtaatgaactagttcttgtacagaataagctgacattaggtgccggatttaaaaaaaaaaaaaaaa

SEQ ID NO: 9664 - protein, 132 aa, Zea mays
  misc_feature: Ceres CLONE ID no. 1549927
  misc_feature: Ceres CDNA ID no. 25447080
  misc_feature: Homolog of GI Number: 50912505 NR Desc: Erwinia induced protein 2
  misc_feature: Homolog of GI Number: 28207685 NR Desc: Erwinia induced protein 2
  misc_feature: Homolog of GI Number: 8778685 NR Desc: T1N15.5
  misc_feature: Homolog of GI Number: 38323071 NR Desc: SPBC30B4.01c
  misc_feature: Homolog of GI Number: 11359723 NR Desc: proteophosphoglycan
  misc_feature: Homolog of GI Number: 34809533 NR Desc: Epa5p
MALEWVVLGYAAGAEAVMLLLLTLPGLDGLRRGMVSVVRSALKPMMSVVPFCLFLLMDIYWKYETRPTCDDEHACTPSEHLRHQKSVMKSQRNALLIAAALLLYWILFSVTQLVVRLDQMQQRVDKLKKRDD

SEQ ID NO: 9665 - DNA, 1179 bp, Zea mays
  misc_feature: Ceres CLONE ID no. 1549944
  misc_feature: Ceres CDNA ID no. 25446773
  CDS (2)..(928): REFERENCED BY SEQ ID NO: 9666
aagcctttaccccaggacgacgagccgctcgctgactggttacttattactagtagcctctctggtcctggtgcatcctcgcggaactcatcacaaggctccacctccaccctcctgcgcgcatggtgactgcagcagcagcagcagcctcctctccccgcagcatgctccgcttcgcattgaccgcctcgtcgtccggccgccaccgaacgtgagtacgtggctctcgacctctcgtccaccgtcaccgccagcggccggatcgccgcgacgtctagagcccccccgcctctgcagccagccggcgctcgcgatgcctcctctggcgccgccgcacggtgagaagggcggcaggcagcggcagggggcggcggcggccccggccccggcccagcggtcggcgtcgttccacgggcgcgggacggagcagcggcaccaccagccgcagaagcagaggcccaagacgctgcccgacctgctcgccggcgtccggggggcgagcttccgctccgggtccccgcccccggacggcgacgcggggcggaggacgccgagcaaggtcctggtcagcgtggcggtgcagcagagcatgtggccgctgcacgtcatggcgcccgccgagtggaccgtggcggacctggtggcggccgccgtcgccctctacgtcaaggaaggccgccgcccgctgctgccgtcgaccgacccggccgccttcggcctccactactcccagttcagcttggacagtctgaacccaaaggagaaaatcatggaactaggctccaggagcttcttcctgtgcccaagatcttgggctgccggtcaggacgcttcgtcgtcctccggcacagcgaacggggtcaccagtgcggcatcagggaaaacaccggcctggcttagctacatgccgttctggccaacgatgtgatcggctagcacaccccaaactcttccaggtcctaaagaatctccaagtattgcatttgtgagacagatggctacaaggacattgtaaatgtatatgttttggagtttgtaagcatcttgaatggtgcacgtgcgatcctgcaaatcatctgtggcccatgttacaacccacagattcaggaaaaaaatatcgaatgtttatgtaattaaaaaaagtttaaaacagttttaatggcaaaaaaaaaaaaaaaa

SEQ ID NO: 9666 - protein, 204 aa, Zea mays
  misc_feature: Ceres CLONE ID no. 1549944
  misc_feature: Ceres CDNA ID no. 25446773
  misc_feature: Homolog of GI Number: 38347592 NR Desc: OSJNBa0042I15.5
  misc_feature: Homolog of GI Number: 70664003 NR Desc: OSJNBa0042I15.6
  misc_feature: Homolog of GI Number: 50252113 NR Desc: pentatricopeptide
  misc_feature: Homolog of GI Number: 21243053 NR Desc: pseudouridylate synthase
MPPLAPPHGEKGGRQRQGAAAAPAPAQRSASFHGRGTEQRHHQPQKQRPKTLPDLLAGVRGASFRSGSPPPDGDAGRRTPSKVLVSVAVQQSMWPLHVMAPAEWTVADLVAAAVALYVKEGRRPLLPSTDPAAFGLHYSQFSLDSLNPKEKIMELGSRSFFLCPRSWAAGQDASSSSGTANGVTSAASGKTPAWLSYMPFWPTM

SEQ ID NO: 9667 - DNA, 858 bp, Zea mays
  misc_feature: Ceres CLONE ID no. 1550171
  misc_feature: Ceres CDNA ID no. 25447019
  CDS (163)..(546): REFERENCED BY SEQ ID NO: 9668
ggggactccggccgcgagaacccgcgactaagccaggacgcgggacgccacagccaccggcctcagcatccgcctaggacgaataacccttctaggctgccgccgccgccgtccttagctcatattgttgccggcgaagagcgccccagatccgcccctgctatggagtcggcggtgaacccgaaggcgtacccgctggctgatgcgcagctgacgataggtatcatcgatatcatccagcaggccgccaactacaagcagctcaagaagggagctaacgaagcgacgaagaccctgaacagggggatatcggagttcgtagtgatggcggcggacacggagccgctcgagatcctcctccacctccccttgctagctgaggataagaacgtgccatatgtatttgttccatcgaaacaagctcttggccgtgcttgtggtgtgacaaggcctgtcattgcttgctcagtgaccagcaatgagggtagccagctgaaacaacagatacagggtctcaaggactcgattgagaagcttctcatctgatttaccaaagacctttcagggtgatgggcctcagcgacacatttttcagaggcttggactggtgatggtgtcttgtttactagattttacgtctttccaaactatgtttgaacactgttaggtcgaccatacttgaattgtgcttatatatttgactgtcatgtattctgaagatgcatctgcattctggtgccttggtttatgttgagattctgaccatcattgtaacggttgattactatgagtttgagaattggatcgattggatggttgcaatttccatgtgaccaggacagataaaaaaaaaaaaaa

SEQ ID NO: 9668 - protein, 127 aa, Zea mays
  misc_feature: Ceres CLONE ID no. 1550171
  misc_feature: Ceres CDNA ID no. 25447019
  misc_feature (25)..(113): Pfam Name: Ribosomal_L7Ae PFAM Desc: Ribosomal protein L7Ae/L30e/S12e/Gadd45 family
  misc_feature: Homolog of GI Number: 47027071 NR Desc: ribosomal protein L7
  misc_feature: Homolog of GI Number: 21592866 NR Desc: Ribosomal protein L7Ae
  misc_feature: Homolog of GI Number: 21592608 NR Desc: ribosomal protein L7Ae
  misc_feature: Homolog of GI Number: 21554922 NR Desc: Ribosomal protein L7Ae
  misc_feature: Homolog of GI Number: 13605585 NR Desc: AT4g12600/T1P17_190
  misc_feature: Homolog of GI Number: 30687670 NR Desc: ribosomal protein L7Ae/L30e/S12e/Gadd45 family protein
  misc_feature: Homolog of GI Number: 51764844 NR Desc: similar to NHP2
  misc_feature: Homolog of GI Number: 55661284 NR Desc:  similar to NHP2
  misc_feature: Homolog of GI Number: 57092713 NR Desc:  similar to NHP2
  misc_feature: Homolog of GI Number: 62083495 NR Desc: hoip
  misc_feature: Useful for making ornamental plants with modified flowers
MESAVNPKAYPLADAQLTIGIIDIIQQAANYKQLKKGANEATKTLNRGISEFVVMAADTEPLEILLHLPLLAEDKNVPYVFVPSKQALGRACGVTRPVIACSVTSNEGSQLKQQIQGLKDSIEKLLI

SEQ ID NO: 9669 - DNA, 2624 bp, Zea mays
  misc_feature: Ceres CLONE ID no. 1550334
  misc_feature: Ceres CDNA ID no. 40041461
  CDS (544)..(2409): REFERENCED BY SEQ ID NO: 9670
aatctccctactttccacgcaactgcgtttcccccggactgttcttccacgattccgttggacccctagcgctcctcagtcagtcctcgcccctcccagcaccggccaacaatccctcaccttattccctgtagctactatgctgccctcttggatccctttttcacttgtctgagatttagccgccgcccggtaggaagaagaaggggaagcaccatattttctgttcctggcctggcggctggcgcagcgccggtgagatttcagtccgggatcggcaacgctgggaggactcgcgtgtgatttacgccgacttccgtgccgctctaggaagggtcacgtcgaggaggcttttgccgacgcggatttgcctggagccagccaagcagagcgcagaattgggggtgtttggccgtgcaaagccagaaagctctcggtttggctgccgaaaccgcttgaggcgaccaccatctcatggtcgtagtggtccgggtccggcacaagtaggggctcgcgtcttgcgcttggcagttgtgggaagccatggagccgtcgtcgtccatcacgttcgcgtcgtcgtcgtcgtacctgtccaacggctccagcccctgttccgtcgcgctgccgccgccagggccgccccagactcccccgttgcctgccggccaggggtggggtgctggagtcgctgccgcagggagcggaggcagcgtggaggccgtgagcctgaaccggctcagcaaaaacctcgagcggctgctcctcgacccggacctagactgcagcgacgccgacgtcgatgtgcccgacggtgggccgcccgtacccatccaccgctgcatccttgccgcacgcagcgacttcttctacgacctcttcgccgctcgcggccgcgcaggggcagcgcgcggtgatgcggccgccggcgccggagtagccgcggagggggctgccagtggaaggccgcggtacaagatggaggatctcgttcccgccggccgcgtggggcgcgaggccttccaggcgtttctggggtacctgtacaccggcaagctccggccggcaccggtcgacgtggtgtcttgtgctgacccagtgtgccatcacgattcgtgcccgccggccatcaggtccgcggtcgagctcatgtacgcggcgtgtaccttcaagatccccgagctcacctcgctcttccagcggcggcttcttaattttgtagacaagactctagtggaggatgtcattcctattctggaagttgcttcccactcagggctgactcaagtgatcgacaaatgtattcaaaggattgctagatcagatcttgatgatatatctttggataaggagctccctccagaagcagttgatgagataaaaaatttgcgcaagaagtcacaaactgctgatggtgatacgttcatttcggaccctgtgcatgagaaaagagtcagaagaatccacagggcacttgactctgatgatgttgagcttgtgaagttgcttcttaatgagtccgacatcacattagatgatgccaacgcattacactatgctgcttcttactgtgatcctaaagttgtctcagagctgttagatttggcaatggctaacttaaatttgaagaatagccgtgggtacacagcactccacttggctgctatgaggagagaaccagctataatcatgtgtctccttaacaaaggggcaaatgtgtcacaactgacagctgatggcagcagcgcaattggtatttgtcggaggttaacaagagcaaaagactacaatacaaagatggagcagggtcaagaatcaaataaagataggctgtgtatagatattctagagagggagatgatgcggaatcctatggcggtggaagatgccgtcacctcgcctttgttggcagatgatcttcacatgaagcttctctacctggaaaacagagttgcatttgctagattgttctttcctgctgaagccaaggtcgccatgcaaatcgcacaagcagacaccacagaagaattcggcggtatagttgcagttgcagcaagcacttccggtaaactgagggaggtggaccttaatgagacgccagtgacacaaaacaaaaggctccgttcaagggtagatgcactgatgaaaacagtggagctgggccgtcggtacttcccgaactgctcgcaggtgctggacaagttcctggaggacgatctgccggaaggtctggaccagttctacctccagaggggcacagccgatgagcagaaggtgaagaggatgcgcttctgcgagctgaaagaggacgtgctgaaggcgtttagcaaggacaaggcggagggcagcgtgttctcgggcctgtcctcgtcgtcgtcgtgctcgccgccccagaagtatgcccagaggtgatcaaggcaccagtttttgccgtatagtttgttatcatggtcttcgagacttggacccggacagcatatagggacatgtacacctgtgtatgtatagtgcttacaattggcgtaagtagaactatatgtatggaacataaggaaacatggcaggaacaccgtgcaaaaagatgaaaagatggccgaagtgctctatgcgaaaaaaaaaaaaaaaaa

SEQ ID NO: 9670 - protein, 621 aa, Zea mays
  misc_feature: Ceres CLONE ID no. 1550334
  misc_feature: Ceres CDNA ID no. 40041461
  misc_feature: Useful for making plants with modulated growth and phenotype characteristics
  misc_feature: The sequence is a functional homolog of  SEQ ID NO 1466 in the  10/374,780 US patent application
  misc_feature: The sequence is a functional homolog of  SEQ ID NO 872 in the  10/666,642 US patent application
  misc_feature (330)..(363): Pfam Name: Ank PFAM Desc: Ankyrin repeat
  misc_feature (74)..(225): Pfam Name: BTB PFAM Desc: BTB/POZ domain
  misc_feature: Homolog of GI Number: 22654983 NR Desc: AT5g45110/K17O22_11
  misc_feature: Homolog of GI Number: 49182284 NR Desc: NIM1
  misc_feature: Homolog of GI Number: 49182276 NR Desc: NIM1
  misc_feature: Homolog of GI Number: 49182282 NR Desc: NIM1
  misc_feature: Homolog of GI Number: 56849532 NR Desc: ankyrin repeat BTB/POZ domain
  misc_feature: Homolog of GI Number: 53793559 NR Desc: putative NPR1
  misc_feature: Homolog of GI Number: 34909872 NR Desc: putative Regulatory protein NPR1
  misc_feature: Homolog of GI Number: 21593759 NR Desc: Regulatory protein NPR1
  misc_feature: Homolog of GI Number: 20334784 NR Desc: At1g64280/F15H21_6
  misc_feature: Homolog of GI Number: 4538941 NR Desc: NPR1 like protein
MEPSSSITFASSSSYLSNGSSPCSVALPPPGPPQTPPLPAGQGWGAGVAAAGSGGSVEAVSLNRLSKNLERLLLDPDLDCSDADVDVPDGGPPVPIHRCILAARSDFFYDLFAARGRAGAARGDAAAGAGVAAEGAASGRPRYKMEDLVPAGRVGREAFQAFLGYLYTGKLRPAPVDVVSCADPVCHHDSCPPAIRSAVELMYAACTFKIPELTSLFQRRLLNFVDKTLVEDVIPILEVASHSGLTQVIDKCIQRIARSDLDDISLDKELPPEAVDEIKNLRKKSQTADGDTFISDPVHEKRVRRIHRALDSDDVELVKLLLNESDITLDDANALHYAASYCDPKVVSELLDLAMANLNLKNSRGYTALHLAAMRREPAIIMCLLNKGANVSQLTADGSSAIGICRRLTRAKDYNTKMEQGQESNKDRLCIDILEREMMRNPMAVEDAVTSPLLADDLHMKLLYLENRVAFARLFFPAEAKVAMQIAQADTTEEFGGIVAVAASTSGKLREVDLNETPVTQNKRLRSRVDALMKTVELGRRYFPNCSQVLDKFLEDDLPEGLDQFYLQRGTADEQKVKRMRFCELKEDVLKAFSKDKAEGSVFSGLSSSSSCSPPQKYAQR

SEQ ID NO: 9671 - DNA, 1845 bp, Zea mays
  misc_feature: Ceres CLONE ID no. 1550526
  misc_feature: Ceres CDNA ID no. 40041462
  CDS (139)..(1566): REFERENCED BY SEQ ID NO: 9672
agtctcgctcagcagctctctccgactccttcgatcccttccctcctctcgccgccggccgattcacttcttccatcattcgattaagcaagcaaggcaaggcgcatttccctcgggtgactcgatcggccgcgcgcgatgtctgcgacgcagccgtggaggtcgctgctctgctgcgcggcggcgggatacgacgacgccgacgagccgccgccgtcgtcgcgggggcagaggaagggccggagcaggagggaccgggaccgggagcggctccagctgctgctgctgccgtcgtcctcgtcggcggcgtcgcgggtgtcgctgtcgagcctggggggttcgtcggggacgctgacgcccgaggacctgtccctgacgctgtcgggctccagcctgcacgccttcacctgcgccgagctgagggccgccaccgcgggcttctcccgcgccaactacctcggctgcggcggcttcggccccgtctaccggggccgcgtcgccgccggcctccgcccgggcctcgacgcgcagccggtggccgtcaagtacctcgacctcgactgcggcacgcagggccaccgcgagtggctggccgaggtcttcttccttgcccagctccgacacgacaacctcgtcacgctcatcggctactgctacgaggacgaccaccgcatgctcgtgtacgagtacatgagcaaccagagcctcgagaaacacctcttcagaagtctcgacggccccatgccatggatgacgaggatgaagatcgccgtcggcgcggccaagggcctcgccttcctccacggcgcggacacgccggtgatctaccgggacttcaaggcctccaacatcctgcttgaccaggactacagcaccaagctgtcggactttgggctcgccaaggacgggcctcagggcgacgcgacccacgtaacaacgcgcgtcatggggaccaacgggtacgcggcgccagagtacatcatgacggggcacctcaccgccaagagcgacgtctacagcttcggggtagtgctgctggagctcctgacgggccgtcggtccgtcgatcggtctcggcggcccagggagcagagcctggtggactgggccagaccctacctcaagaagcccgacaagctctaccgggtcatggatccagccatggagtgccagtactcgtgccaaggggccggacgcgccgctatggtggcgtacaagtgcctgagccagaaccccaagtccaggcccaccatgagggaggtggtccaggccctggagcccgtcctggacatgaacgactaccttcaaataggctcgtttgtgttcaccgtcgtggtggaagacagcaacgacgacgacagccaaggcaagatggtcgacgtgacgatagagacgacggtggaggagaagcgccagagccaccaggaccggcaccggcagaagttccccaactcgcttgtcaatgccgacgtggtgctgcaccgggacggcgacctggggaagcacattgccgcgctgcggcggcaccggaggacgtccagctacgtcaaggagagaggggcgtagaagcgtagcatatagccttcagggtgaattggcaggcatggcgcgtactagtgtttaggagagaatcaacaaaagaaaaatattaatgtgtacatataattaagctagatcatagatgggtgtggcacaacaaggcatacacaaccatgcctcatttggtttggtggccaaaaaattgttcattttttgttcgtgttagtgataattggtgtaactgtccatggtgacatgattatgttcataaattgatgaacacagggacaaaaaaaaaaaaaaaaa

SEQ ID NO: 9672 - protein, 475 aa, Zea mays
  misc_feature: Ceres CLONE ID no. 1550526
  misc_feature: Ceres CDNA ID no. 40041462
  misc_feature (360)..(379): Pfam Name: Pkinase_Tyr PFAM Desc: Protein tyrosine kinase
  misc_feature: Homolog of GI Number: 51535992 NR Desc: putative Avr9/Cf
  misc_feature: Homolog of GI Number: 50946475 NR Desc: putative Avr9/Cf
  misc_feature: Homolog of GI Number: 51091273 NR Desc: putative Avr9/Cf
  misc_feature: Homolog of GI Number: 53857147 NR Desc: Avr9/Cf
  misc_feature: Homolog of GI Number: 50920343 NR Desc: Putative serine/threonine protein kinase
  misc_feature: Homolog of GI Number: 50939237 NR Desc: putative auxin
  misc_feature: Homolog of GI Number: 14484938 NR Desc: auxin
  misc_feature: Homolog of GI Number: 50916410 NR Desc: putative serine/threonine protein kinase
  misc_feature: Homolog of GI Number: 31431881 NR Desc: putative serine/threonine protein kinase
  misc_feature: Homolog of GI Number: 62319981 NR Desc: serine/threonine protein kinase
MSATQPWRSLLCCAAAGYDDADEPPPSSRGQRKGRSRRDRDRERLQLLLLPSSSSAASRVSLSSLGGSSGTLTPEDLSLTLSGSSLHAFTCAELRAATAGFSRANYLGCGGFGPVYRGRVAAGLRPGLDAQPVAVKYLDLDCGTQGHREWLAEVFFLAQLRHDNLVTLIGYCYEDDHRMLVYEYMSNQSLEKHLFRSLDGPMPWMTRMKIAVGAAKGLAFLHGADTPVIYRDFKASNILLDQDYSTKLSDFGLAKDGPQGDATHVTTRVMGTNGYAAPEYIMTGHLTAKSDVYSFGVVLLELLTGRRSVDRSRRPREQSLVDWARPYLKKPDKLYRVMDPAMECQYSCQGAGRAAMVAYKCLSQNPKSRPTMREVVQALEPVLDMNDYLQIGSFVFTVVVEDSNDDDSQGKMVDVTIETTVEEKRQSHQDRHRQKFPNSLVNADVVLHRDGDLGKHIAALRRHRRTSSYVKERGA

SEQ ID NO: 9673 - DNA, 513 bp, Zea mays
  misc_feature: Ceres CLONE ID no. 1550787
  misc_feature: Ceres CDNA ID no. 40352029
  CDS (79)..(312): REFERENCED BY SEQ ID NO: 9674
gggtccgccgcccgcactaccacgcccccgctcctctcgtctctatcttcgcctcttccatcgcaggattcagcggccatgggcggcggcaacgcccagaagtccaagatggcgcgcgagaggaacgccgagaagaacaagggcggcaaaggcagccagctggaggccaacaagaaggccatgaacatccagtgcaagatctgcatgcagaccttcatctgcaccacctccgaggccaagtgcaaagaacatgcggaggcgaggcatcccaagaacgacctctaccagtgcttcccccacctcaagaattagtaagcagcagaatcatatgctctgctcagctaaaacacaagtactacatatatatatacgctgtgtgtcaattaatgggttctaggctgctgttgatgcggctttcctgttgccccgtctgattatgtactgtaaccttggctgtcagcctgctgtgctaaaaaccactggttctgtggattcatgcaaaaaaaaaaaaaa

SEQ ID NO: 9674 - protein, 77 aa, Zea mays
  misc_feature: Ceres CLONE ID no. 1550787
  misc_feature: Ceres CDNA ID no. 40352029
MGGGNAQKSKMARERNAEKNKGGKGSQLEANKKAMNIQCKICMQTFICTTSEAKCKEHAEARHPKNDLYQCFPHLKN

SEQ ID NO: 9675 - DNA, 1979 bp, Zea mays
  misc_feature: Ceres CLONE ID no. 1551657
  misc_feature: Ceres CDNA ID no. 35383458
  CDS (183)..(1823): REFERENCED BY SEQ ID NO: 9676
aaaccctccgcaccggctcctcgccgcagctataaatacacgggtccgccatttccagtcctccaagacttgaaccacgcaaccctctctggtcgtcccactttcttccacaccagaaggaaacttgagtcgcgcgcgagcagtagtgcatccaatccaatccacaaagaggttagtcagccatggcggcaccgccgaccgaggactgcggctggctgctgtacctctccctggccgccaaatgcggcgaccctagccgcctgctcggcttggcggcggtcttcgtcgccgcctgcgtcgtaacgtcgctcctgcactgggcgtgcccgggcggccccgcctgggggcggtactggtggaccaggcgaggcgggctgggcatcgtccgcgccgccatcccgggaccccggggcctgccggtggtcggcagcatggggctgatgaccggcctggcgcaccgcaagctcgcggcggcggccgtgagtcagggcagcagcaggcgccgccgtctgatggcgctctccctcggcgagacccgggcggtggtgaccggcgacccggacgtcgcgagggagctgctcggcagcgccgccttcgccgaccgccccgtcaaggagtccgcgtacgggctcctcttccaccgcgccatcggcttcgccccgcacggcgcctactggcgcgcgctccgccgcgtggcgtcggcgcacctcttctcgccgcgccaggtcgcggcctcctccgcgcagcgcgcggtcatcgcgcgccagatggtggacgccgtgaccacgaccacgaccacgaccgcccccgccgtcgtggtggcgcgccggttcctgaagcgcgcgtcgctgcacaacgtcatgtggtcggtgttcgggcgcaggtacgacctgctgctggctgcggacggcgaggagctgaaggcgttggtggacgaaggctacgacctcctcgggcagctgaactggtccgaccacctcccgtggctggcccgcttcgacctgcaaaggacccgggccagatgctccgcgctcgttccgcgggtgaaccgcttcgttggcaacatcatcgacgagcaccgtgcgcgcctcggcgacaccggcgtcacggacttcaccgacgtcctgctctccctccagggcgtcgacaagctctccgacgccgacatggtcgccgttctctgggagatgatcttccgaggcacggacacggtggccgtcctaatggagtgggtgctggcgcgtctcgtgctgcaccaggacgtgcagagcaaggtccaggaggagctggaccgggtggtcgggccaccgggccaggccgcatccgtgacggagtcggacaccgcctcgctcgtctacctccaggcggtcatcaaggaagtgctgcgcctgcacccgccaggcccgctgctctcctgggcgcgcctggccacgtcggacgcgcgcgtaggcgggtaccacgtgcccgcgggcacaaccgccatggtgaacatgtgggccataacgcatgaccccagcgtgtgggccgagccgacggagttcaggcccgagaggtttgtgggcgcccctgctggtgctggtgccgaggacgttcccatgataatgggctcggatctccggctcgcgcccttcgggtccggcaggcggagctgccccggcaagtcgctcgcgctggctaccgtcgggttctgggtggccaccctgctccacgagttcaaatggttgccgccgtgccgcggcgtcgacctgtccgaggtgctgaggctgtcgtgtgagatggctgcaccgctggaggcgagggtggtgccacgtcacgcggtgtgagatgacgaggatgagacacgtggcctggggaggaggagttgcccgatcgtctgtctagatatatcttatcttagctttccttaccttgtagcagagaacgtaacgtggcccggcggcgatggatgagaatgagatgtgtaaaaaaaaaaaaaaaaa

SEQ ID NO: 9676 - protein, 546 aa, Zea mays
  misc_feature: Ceres CLONE ID no. 1551657
  misc_feature: Ceres CDNA ID no. 35383458
  misc_feature (72)..(542): Pfam Name: p450 PFAM Desc: Cytochrome P450
  misc_feature: Homolog of GI Number: 31711948 NR Desc: At3g61880
  misc_feature: Homolog of GI Number: 2739008 NR Desc: CYP78A3p
  misc_feature: Homolog of GI Number: 5921925 NR Desc: Cytochrome P450 78A4
  misc_feature: Homolog of GI Number: 22758273 NR Desc: Putative cytochrome P450
  misc_feature: Homolog of GI Number: 6715638 NR Desc: T25K16.18
  misc_feature: Homolog of GI Number: 15223341 NR Desc: cytochrome P450
  misc_feature: Homolog of GI Number: 21592543 NR Desc: cytochrome p450
  misc_feature: Homolog of GI Number: 20197777 NR Desc: putative cytochrome P450
  misc_feature: Homolog of GI Number: 50725143 NR Desc: putative cytochrome P450
  misc_feature: Homolog of GI Number: 50948231 NR Desc: putative cytochrome p450
  misc_feature: Useful for delaying senescence
  misc_feature: Useful for increasing chlorophyll and photosynthetic capacity
  misc_feature: Useful for making ornamental plants with modified flowers
  misc_feature: Useful for making ornamental plants with modified flowers
  misc_feature: Useful for making plants with altered leaf shape eg curled leaves
  misc_feature: Useful for making stronger plants
  misc_feature: Useful for making taller plants and plants with longer flowers
  misc_feature: Useful for making taller plants and plants with longer inflorescences
  misc_feature: Useful for modifying fruit shape and seed yield
  misc_feature: Useful for sterility
MAAPPTEDCGWLLYLSLAAKCGDPSRLLGLAAVFVAACVVTSLLHWACPGGPAWGRYWWTRRGGLGIVRAAIPGPRGLPVVGSMGLMTGLAHRKLAAAAVSQGSSRRRRLMALSLGETRAVVTGDPDVARELLGSAAFADRPVKESAYGLLFHRAIGFAPHGAYWRALRRVASAHLFSPRQVAASSAQRAVIARQMVDAVTTTTTTTAPAVVVARRFLKRASLHNVMWSVFGRRYDLLLAADGEELKALVDEGYDLLGQLNWSDHLPWLARFDLQRTRARCSALVPRVNRFVGNIIDEHRARLGDTGVTDFTDVLLSLQGVDKLSDADMVAVLWEMIFRGTDTVAVLMEWVLARLVLHQDVQSKVQEELDRVVGPPGQAASVTESDTASLVYLQAVIKEVLRLHPPGPLLSWARLATSDARVGGYHVPAGTTAMVNMWAITHDPSVWAEPTEFRPERFVGAPAGAGAEDVPMIMGSDLRLAPFGSGRRSCPGKSLALATVGFWVATLLHEFKWLPPCRGVDLSEVLRLSCEMAAPLEARVVPRHAV

SEQ ID NO: 9677 - DNA, 2094 bp, Zea mays
  misc_feature: Ceres CLONE ID no. 1552616
  misc_feature: Ceres CDNA ID no. 40041463
  CDS (149)..(1795): REFERENCED BY SEQ ID NO: 9678
aagcagatccaccggcacgagaccgaccccgtttcctcgctccttcgtctctcgctgacactgtttgacccctgtcctccaggctcggctccagctaaggtcgagcggcgaggcgacagccctagtgtagcgcggcgcggtaccatagatggggagacgaatggaggccccctcctcgccggcgtccctcgtcgtcgtcctcctcctcggctcgctgctcctgcaggcacgcgccgatgacccctacaggttctacacctggaacgtcacctttggcgacatctacccgctcggcgtcaagcaggaggggatactgatcaacggccagttcccggggccgcagatcgacgccgtcaccaacgacaacatcatcgtcaacgtcttcaacaacctgccggtccccttcctcctctcctggcagggaattcagcagcggaggagctcatggcaggacggcgtgtacggcaccaactgcccgatccctccgggcggcaatttcacttacaacatgcagttcaaggaccagatcgggagctactactacttcccttcccttctgtttcacaaggcagctggcggttacggtgccatcagggttctcagccggccgaggatccctgtcccgtttgacccgcctgccggggatttcaccatattggcgggtgactggttcaagctcaaccacaccgacctgaaaggcattctggacagtggcaatgacctgccgtttcctgacggccttcttatcaatggccaaggttggaatggcaacagattcacggtggaccaagggaaaacgtatcggttccgggtgtcgaacgtgggaatcgcgacctcggtgaacataaggatccaaggccattccatgctgctggtcgaggtggaggggtctcacaccatgcagagcacttacacgtccatcgacgtccatctaggccaatcatactcgttccttgttactgctgatcagccacctgcagactactccatagttgtctccacacgctttaccacccctgtcctcaccaccgctgccatcctccactacagcagctcaaatggtgctgcaagtgtgccgcctcccccggcgcctaccgttgagatcgatttctctctcaaccaggctagatccatccggtggaacctgacagcgagtggaccaaggccaaaccctcagggttcctaccactacggtctcgtcaacaccacaagaaccatcaggctcgccaactcgcgggcaaccatcaacggcaagctgagatacgcagtgaacggcatctccttcgtcccggccgacactcctctcaaggttgctgatttctacagcatcccgggagttttcacgctgggcagcatgcccgacaacccgacgggcggcggcgcttacctccagacgtctgtgatggcggccaacatgcgggactatgttgaggtcgtctttgaaaacgcggagaacttggtgcagtcgtggcacatcgacggctacgcgttctgggtcgtcgggatggatggaggacagtggacaccggctagtcgtcagggctacaacctcagggacgccattgctcggtacacattgcaggtgtaccctcagtcatggacggctatctacatgccgctggacaacgtggggatgtggaacgtgaggtccgagagctgggccaggcagtacctcggccagcagttctacctccgcgtctactcgccggcgaactcgtggcgggacgagaacccgatccccaagaacgcgctgctctgcggccgggcctctggacgccggaccaggcctctctgaagctgaatccctgagcccaagaagaccatgtttgttcggccacgaaggggtggccggaacttgcggggatcaattgaagttgagggaagagatcattggagtgttcagattgctgaactgagttccattttgtggcgctgatgatcgttcagctcatatattatttagcaattgtagctaaaacattaattcccggtcgatttgttgtatgtgaagcttcctcgcttcctcgctcacatcattgatgatgataatattcatagtaaccagattttcctttttaaaaaaaaaaaaaaaaa

SEQ ID NO: 9678 - protein, 544 aa, Zea mays
  misc_feature: Ceres CLONE ID no. 1552616
  misc_feature: Ceres CDNA ID no. 40041463
  misc_feature (161)..(299): Pfam Name: Cu PFAM Desc: Multicopper oxidase
  misc_feature (35)..(151): Pfam Name: Cu PFAM Desc: Multicopper oxidase
  misc_feature (379)..(519): Pfam Name: Cu PFAM Desc: Multicopper oxidase
  misc_feature: Homolog of GI Number: 15982771 NR Desc: At1g76160/T23E18_10
  misc_feature: Homolog of GI Number: 31711964 NR Desc: At4g22010
  misc_feature: Homolog of GI Number: 1255951 NR Desc: PS60
  misc_feature: Homolog of GI Number: 9802764 NR Desc: Putative pectinesterase
  misc_feature: Homolog of GI Number: 6573725 NR Desc: T23E18.10
  misc_feature: Homolog of GI Number: 6552745 NR Desc: T26F17.6
  misc_feature: Homolog of GI Number: 6552744 NR Desc: T26F17.7
  misc_feature: Homolog of GI Number: 18400509 NR Desc: multi
  misc_feature: Homolog of GI Number: 1944575 NR Desc: pectinesterase
  misc_feature: Homolog of GI Number: 23198038 NR Desc: pectinesterase
MEAPSSPASLVVVLLLGSLLLQARADDPYRFYTWNVTFGDIYPLGVKQEGILINGQFPGPQIDAVTNDNIIVNVFNNLPVPFLLSWQGIQQRRSSWQDGVYGTNCPIPPGGNFTYNMQFKDQIGSYYYFPSLLFHKAAGGYGAIRVLSRPRIPVPFDPPAGDFTILAGDWFKLNHTDLKGILDSGNDLPFPDGLLINGQGWNGNRFTVDQGKTYRFRVSNVGIATSVNIRIQGHSMLLVEVEGSHTMQSTYTSIDVHLGQSYSFLVTADQPPADYSIVVSTRFTTPVLTTAAILHYSSSNGAASVPPPPAPTVEIDFSLNQARSIRWNLTASGPRPNPQGSYHYGLVNTTRTIRLANSRATINGKLRYAVNGISFVPADTPLKVADFYSIPGVFTLGSMPDNPTGGGAYLQTSVMAANMRDYVEVVFENAENLVQSWHIDGYAFWVVGMDGGQWTPASRQGYNLRDAIARYTLQVYPQSWTAIYMPLDNVGMWNVRSESWARQYLGQQFYLRVYSPANSWRDENPIPKNALLCGRASGRRTRPL

SEQ ID NO: 9679 - DNA, 754 bp, Zea mays
  misc_feature: Ceres CLONE ID no. 1553869
  misc_feature: Ceres CDNA ID no. 40352030
  CDS (85)..(441): REFERENCED BY SEQ ID NO: 9680
gtgcccgcggtgctagtaacggttgctctagatccgttcatcctggtggttttgtgaggtcgaaagcggcgagcgaattagaagatgctggacaagctgtgggacgacgtggtggccgggcctcgcccggagacgggcctggagaagctccgcaaggccaccaccgcccgcccgctcgtcatcaacaaagacgcggacggcggcagctacaagcgggcgcagtcgacgccgtcgaccccgacgacgccggtgacgccgtcgtcgtcgtcgtcgtcgacgacgccgcgcggcgccggcaacgtgtggcgcagcgtcttccacccggggagcaacctggccaccaagggcatgggcgccaacctcttcgaccggccgcagcccaactcccccaccgtctacgactggctctacagcgacgagaccaggagcaaccaccgctagatcgggcgagatggacagtgaagaggcccggtgtctctgtcaggccatgtttgctggtccttgtggttatctaaaacgcatgcatgctctattatagctagtcatcactatatatatatgcttgtgtttgtgtattgttgttcttgttctgctggtgtttgaggataaagactccgccgtttaagttgacctatgttatggagtgagtgatatatatatgccgtcactcctagtatatagtagtgactagttggtatgtgtagtactgtactatcttttctccatatgcatgttttgccaaaaaaaaaaaaaa

SEQ ID NO: 9680 - protein, 118 aa, Zea mays
  misc_feature: Ceres CLONE ID no. 1553869
  misc_feature: Ceres CDNA ID no. 40352030
  misc_feature (5)..(118): Pfam Name: Auxin_repressed PFAM Desc: Dormancy/auxin associated protein
MLDKLWDDVVAGPRPETGLEKLRKATTARPLVINKDADGGSYKRAQSTPSTPTTPVTPSSSSSSTTPRGAGNVWRSVFHPGSNLATKGMGANLFDRPQPNSPTVYDWLYSDETRSNHR

SEQ ID NO: 9681 - DNA, 794 bp, Zea mays
  misc_feature: Ceres CLONE ID no. 1553890
  misc_feature: Ceres CDNA ID no. 36691519
  CDS (121)..(570): REFERENCED BY SEQ ID NO: 9682
ggcttcatctcctcctttcctccccaaaagacacaagagggggaagagagagagaggagaggcagagagaagagggggaggcagtccagtgtccacgcacgtacgctccacataagagagatggcgatgcgggcggcggcggcggcagtggcgctggtggcggtgatgggcgtgctggcgccgcgagcggcggcgcagacgccgaactgcgcggagaaactgatcccgtgctcgccgtacatgaacacgacggggacgccgccggatacctgctgcggcccgctcaaggacgccgtccagaacgacctcaagtgcctctgcgacctctacgcctcgccggagatcttcaaggccttcaacatcagcctcgaccaggccctcggcctctccaagcgttgcggcctcagcgacaccaccgccgcctgcaagggcctttctcctacgcagtctcctccaggttcgccgccatcaggcggcagcagcaacgccgcccatcgcgctctgccggccagtttcgcgcgactggtgacgagcttgttcctggctctgtggtctgtattattggcgtaaattaaaagctccgcatgctgcagcgggcggcaatgcttgttgcttgtcttatcccacagtagatgatttcacttgcacatacgatacgatcaacatttgttttgctgtgctgtgtgtctgatgagatcagaatttctcattggttccttcgtggtgttcgtgttagactccgcacaattaaatggaaggtttctggctagttgctataccaaaaaaaaaaaaaa

SEQ ID NO: 9682 - protein, 149 aa, Zea mays
  misc_feature: Ceres CLONE ID no. 1553890
  misc_feature: Ceres CDNA ID no. 36691519
  misc_feature: Homolog of GI Number: 46359807 NR Desc: At1g62790
  misc_feature: Homolog of GI Number: 30696757 NR Desc: protease inhibitor/seed storage/lipid transfer protein
  misc_feature: Homolog of GI Number: 18410388 NR Desc: protease inhibitor/seed storage/lipid transfer protein
  misc_feature: Homolog of GI Number: 21593596 NR Desc: lipid transfer protein
  misc_feature: Homolog of GI Number: 6630451 NR Desc: F23N19.16
  misc_feature: Homolog of GI Number: 42563102 NR Desc: receptor serine/threonine kinase
  misc_feature: Homolog of GI Number: 21592585 NR Desc: lipid transfer protein
  misc_feature: Homolog of GI Number: 7484433 NR Desc: lipid transfer protein
  misc_feature: Homolog of GI Number: 31430674 NR Desc: putative proline
MAMRAAAAAVALVAVMGVLAPRAAAQTPNCAEKLIPCSPYMNTTGTPPDTCCGPLKDAVQNDLKCLCDLYASPEIFKAFNISLDQALGLSKRCGLSDTTAACKGLSPTQSPPGSPPSGGSSNAAHRALPASFARLVTSLFLALWSVLLA

SEQ ID NO: 9683 - DNA, 803 bp, Zea mays
  misc_feature: Ceres CLONE ID no. 1553956
  misc_feature: Ceres CDNA ID no. 29191588
  CDS (141)..(479): REFERENCED BY SEQ ID NO: 9684
ggggcaggccgagagttgtcaacgaggacgtctgccggcagtgctcctgctcctcctcctcctcctcctccttcccggccgccgcgcgagcttgggttagtgtctcttcttcgcggagacctgtgaggagagccatcatcatggccgctgttgagactgttgtcctcaaggttgctatgtcatgcgagggctgcgccggggcggtcagaagagtgctctcgaagatggaaggggttgaaaccttcgacatagacctcaaggagcagaaggtgacagtcaaaggcaatgtcaagcctgaggacgtcttccagacggtttccaagtcggggaagaggacctcctactgggagggggaagccacagccccggacgctgcggcggctccagaagccgaagcagctcccagcaccgcggcagaagcgcctcctgctgctgctccggcggcgccagagatcaccccagccaaagctgacgcctgatcgtcacgctattattcactcacatgtgatgctgcggctgcgactcctaaaccttaaatctagaaatagctggggattgagtttgcattgcatcgtgttcttgccggtctagcaagtgactataagaataatggaataaacgatgacccagtgtgtgtatgatttccgttctgaagaacaacacatcccttgcaggattgttgttcagtagattttacttgtaccgcggctttggagttccccaaaggactttgttcaagaacttcttctctcacaggaaataacatgagtgcagtccgtgcttttatctaaaaaaaaaaaaaa

SEQ ID NO: 9684 - protein, 112 aa, Zea mays
  misc_feature: Ceres CLONE ID no. 1553956
  misc_feature: Ceres CDNA ID no. 29191588
  misc_feature (7)..(68): Pfam Name: HMA PFAM Desc: Heavy
  misc_feature: Homolog of GI Number: 56202338 NR Desc: putative copper chaperone
  misc_feature: Homolog of GI Number: 37651975 NR Desc: chopper chaperone
  misc_feature: Homolog of GI Number: 50909185 NR Desc: copper chaperone homolog CCH
  misc_feature: Homolog of GI Number: 21553785 NR Desc: copper homeostasis factor
  misc_feature: Homolog of GI Number: 6525011 NR Desc: copper chaperone homolog CCH
  misc_feature: Homolog of GI Number: 53748477 NR Desc: copper chaperone
  misc_feature: Homolog of GI Number: 47176684 NR Desc: copper chaperone
  misc_feature: Homolog of GI Number: 30039180 NR Desc: copper chaperone
  misc_feature: Homolog of GI Number: 50942155 NR Desc: putative copper chaperone
  misc_feature: Homolog of GI Number: 18655401 NR Desc: At1g66240/T6J19_6
MAAVETVVLKVAMSCEGCAGAVRRVLSKMEGVETFDIDLKEQKVTVKGNVKPEDVFQTVSKSGKRTSYWEGEATAPDAAAAPEAEAAPSTAAEAPPAAAPAAPEITPAKADA

SEQ ID NO: 9685 - DNA, 674 bp, Zea mays
  misc_feature: Ceres CLONE ID no. 1553974
  misc_feature: Ceres CDNA ID no. 36706818
  CDS (300)..(497): REFERENCED BY SEQ ID NO: 9686
cgtccggtcttcctttcccaactcggtcgacgcgttcgccacggctgcgcaggcctcctcctccgcggtcggctccgcctccgatcccctcccttcgacgatgcgagcacacccgctcatcctcttcgtacctgcaccgccacctcgtcctcttcctcgccgcgccggcacccaccgcgctctctccctcccgcggcgacgcccttcgccaacgagaaccgcacgtcgtcgtctcccacgggcactgtcgcacgctgggccacgctgcagtcggtggcgccgccacaccttcttcctccatgcaccgtcgccgccctattcttcttcgagatgcagccgctagcgctgccctcctcccagctccccttcatggccgcgtgcaggtggaccgctccccaccccgtcgccttcctcctcgtactgcccccaagaacgccctaggttactttttcttagatttgccttttggtttcaagtatgtttctctgatgccctagctgtctggtggattaaatttaattattgagctgcaactttcaccaattggtttggagaaagacaatagaggcttgggttcttttagttaagaaaaattgcgtcggtgttcagttataacataagattgtttattgttctctgtaatctcacatttctttttctaaaaaaaaaaaaaa

SEQ ID NO: 9686 - protein, 65 aa, Zea mays
  misc_feature: Ceres CLONE ID no. 1553974
  misc_feature: Ceres CDNA ID no. 36706818
MHRRRPILLRDAAASAALLPAPLHGRVQVDRSPPRRLPPRTAPKNALGYFFLDLPFGFKYVSLMP

SEQ ID NO: 9687 - DNA, 929 bp, Zea mays
  misc_feature: Ceres CLONE ID no. 1554080
  misc_feature: Ceres CDNA ID no. 36594020
  CDS (83)..(652): REFERENCED BY SEQ ID NO: 9688
gtctgcctctcaccaaccacggcttgccaacctaattagcctttgacccacacccaccccccgccggccgccgctgcagaccatggagcacgcgtccgccttcctcgcgcgcgcgctcaccactccgctcccggcacccgccgccctcccgcggcgccgcccggctcgcgtggccgtcgccgccgcggcgccggagcgcaggccgccgggcgcggtggcgtccaccaccaactacgtcgtgccgctcgacgcggcgccgtccgggatcacgcgcccgctcgtcgagatcctccgcgacctcaacaagcgcgtcccggacgccatcgtgcggccctcctcccggcgcgcctccgcctccgaccccgtcatcccctggtaccatgccaataggatgctcagcttttatgctccaggttggtgtggggaagttcgtgatgttatttacactgacagtggaaaggtgacggtcatataccgcgtgactgtgcgcggaacagatggagaggttcacagggaggctgctggaacagcatcgctgagcgatgaccggttcgacgaccccgtgtctgcggcagaagaggcagcgttctgcaaagcctgcgcgaggttcggtttcggcctttacctgtaccatgaagacgagacaccatagaagaccaacaatttctccacatcgtctatgccggccctgttctgttcagatttgcgcttgaggggctgtgctctactgttgttgatcagtaagtctatcagatacccatcccattgctgctaggtccttgagctgttgtacgctggtactatgttgtttgctcgttttggtagctttgtcttgcaaaaaaatgttgtcagctacaattggtatggattatggaactattagtatatatgcaatacttttttgttgcttacctcaaaaaaaaaaaaaa

SEQ ID NO: 9688 - protein, 189 aa, Zea mays
  misc_feature: Ceres CLONE ID no. 1554080
  misc_feature: Ceres CDNA ID no. 36594020
  misc_feature: Homolog of GI Number: 34907336 NR Desc: putative SnRK1
  misc_feature: Homolog of GI Number: 9367245 NR Desc: SnRK1
  misc_feature: Homolog of GI Number: 67987177 NR Desc: 4Fe
  misc_feature: Homolog of GI Number: 72082973 NR Desc:  similar to Splicing factor
MEHASAFLARALTTPLPAPAALPRRRPARVAVAAAAPERRPPGAVASTTNYVVPLDAAPSGITRPLVEILRDLNKRVPDAIVRPSSRRASASDPVIPWYHANRMLSFYAPGWCGEVRDVIYTDSGKVTVIYRVTVRGTDGEVHREAAGTASLSDDRFDDPVSAAEEAAFCKACARFGFGLYLYHEDETP

SEQ ID NO: 9689 - DNA, 731 bp, Zea mays
  misc_feature: Ceres CLONE ID no. 1554102
  misc_feature: Ceres CDNA ID no. 40352031
  CDS (13)..(504): REFERENCED BY SEQ ID NO: 9690
gaagccaaatcgatggcggcggcggcggccggcggcgagaacagcggcgcgggcgcgggcgcgggtgagttctacctgcggtactacgtggggcacaagggcaagttcgggcacgagttcctcgagttcgagttccgccccgacggcaagctccgctacgccaacaactccaactacaagaacgacaccatgatccgcaaggaggtcttcgtatccccctccgtcctccgcgaggccaggaggatcatccaggagtccgatatcatgaaggaggacgacagtaactggcccgagcccgaccgcatcggccgacaggagctcgagatcgtcatgggcaacgagcacatttcattcaccacttccaagatcggctccctcgtcgatgtccagtccagcaaggacccggagggactccggatcttctactacctcgtccaggatctgaagtgcttcgtgttttcactcatcaacctccacttcaagatcaagccaatccagtcttgagctccatctcaagccttcatgcgactgttttttggagcgttttaagatagaaccttgtaccatgttaagatgctgttgagcttgtgacgatgcgcacggtagaagtggaaccttttttttttgcggttggattgtgcaaactgcgagcagtagtgagtgtggtatatttgtgtcttcagtttcctgttgggtggagtattcttgtcgtttggcaaaaaaaaaaaaaa

SEQ ID NO: 9690 - protein, 163 aa, Zea mays
  misc_feature: Ceres CLONE ID no. 1554102
  misc_feature: Ceres CDNA ID no. 40352031
  misc_feature (19)..(161): Pfam Name: Mago_nashi PFAM Desc: Mago nashi protein
MAAAAAGGENSGAGAGAGEFYLRYYVGHKGKFGHEFLEFEFRPDGKLRYANNSNYKNDTMIRKEVFVSPSVLREARRIIQESDIMKEDDSNWPEPDRIGRQELEIVMGNEHISFTTSKIGSLVDVQSSKDPEGLRIFYYLVQDLKCFVFSLINLHFKIKPIQS

SEQ ID NO: 9691 - DNA, 1009 bp, Zea mays
  misc_feature: Ceres CLONE ID no. 1554153
  misc_feature: Ceres CDNA ID no. 40352032
  CDS (115)..(630): REFERENCED BY SEQ ID NO: 9692
gggtctcccccaccatccgtggcccgacgacgtccccatttccaagctcctcctcgcgattccaatccacgcacgcctcctccgcttccgcctcgctcaggcttatagtcagtgatggaacacaaggaggcgggctgccagcagccggagggcccaatcctatgcatcaataactgcggcttcttcggcagtgctgcgacgatgaacatgtgctccaagtgccacaaggagatgataacgaagcaggagcaggcccagctggctgcctcctccatcgatagcattgtcaatggcggtgacggcgggaaaggacctgtaattgctgcatctgtaaatgcggcagttcctcaagttgagcagaagactattgttgtgcagcccatgcttgtagctgaaaccagcgaggctgctgctgtaatccccaaggccaaggaaggcccagaccggtgcgcggcctgcaggaagcgtgttgggctgacgggatttagctgccgatgcgggaacatgtactgttcggtgcaccgctactccgacaaacatgactgtcagttcgactatcggactgcagcaagggacgcgattgccaaggccaatcctgtggtgagggcggagaagctcgacaagatctgaggcgggcattgggggagcgaaatggttgcaatctgcaagaattcaacatgctgtctttgctgcgttatcattgaaacttgccattcttgtctgctgctgcgtcccgtgaggttcaatactgtgatgcacacagcatccaggcagccgcaagaatttcatcaaaatggtttcccgtgttggctatgtcgtgtaagcttaattcagttattcatggtggtttcggtcggtattgtggtattcccatttaggtagctctgtaatgtattgctgtctcaagcgtgttacattccaattagtaatagtaatcagcaattgtctgccccatatattttttaaaaagtatgttcttgtgatgtcccagcaacaaaaaaaaaaaaaa

SEQ ID NO: 9692 - protein, 171 aa, Zea mays
  misc_feature: Ceres CLONE ID no. 1554153
  misc_feature: Ceres CDNA ID no. 40352032
  misc_feature (112)..(152): Pfam Name: zf PFAM Desc: AN1
  misc_feature (14)..(38): Pfam Name: zf PFAM Desc: A20
MEHKEAGCQQPEGPILCINNCGFFGSAATMNMCSKCHKEMITKQEQAQLAASSIDSIVNGGDGGKGPVIAASVNAAVPQVEQKTIVVQPMLVAETSEAAAVIPKAKEGPDRCAACRKRVGLTGFSCRCGNMYCSVHRYSDKHDCQFDYRTAARDAIAKANPVVRAEKLDKI

SEQ ID NO: 9693 - DNA, 1149 bp, Zea mays
  misc_feature: Ceres CLONE ID no. 1554291
  misc_feature: Ceres CDNA ID no. 29191604
  CDS (1)..(882): REFERENCED BY SEQ ID NO: 9694
gtaaccaggcagagaggcaaggaggggatgagcttccaggacctggaggcgggccacgtccgtggggcgccgcccggcggcggccggaggagcggccggggggacctcgccggcgccggcgccggcgcgggcgcgtcgcaggccgtggcgtcgggcgtcttccagatcaacaccgccgtcgccacgttccagcgccttgtcaacacgctcggcacgcccaaggacacccccgacctccgcgacaggatacataaaacacggcaacacataacacagctagtgaaggatacatcagacaagcttaaacaagccagcgaggcggatcatcgcgttgaagtcagcgctaccaagaagattgctgatgcaaagctagctaaagatttccaagcagtcctaaaagaattccagaaagcccaacgattagcagcagagagagaagctgcatatgcaccttttatttctcaagcgggcttgccacagagctacaactcaagtgaagtgaataatggtgctgataggttggcagagcagcgcacacagcttctagaatctagaaggcaggagttggtcttcttggataatgaaatcgtgttcaatgaggccatcattgaggagagggatcagggaatacaagagattcagcaccaaatcactgaagtaaatgaaatcttcaaagatctcgctgtgctagtccatgatcaaggagcaatgatagatgacattgattcccatatagagaacgccgttgtagcgacttcgcaggctaaaggccagctttcaaaggctgctaaaactcagaagtcgaactcttctctgatatgcttgttgctcgttattttcggagtggtcctgctcatagtgattatagtacttgcagcctaaaagcttggaaggcagctggggttccgaaatctgatcgagagcttattgcgacaaattccttcataagttatttttgctgtgctgctaggaatgattcctggtacccaggcggtgattggcgctctgcttgtggtgtggtggtatatgtggtgatgatgaaatctgatgcataaaagtactctttcctgcaagtgtagtgcctcatgcacgtttttgtttatatattgtgatgtatgagtgcgtgatgtagaacaaaaaaaaaaaaaa

SEQ ID NO: 9694 - protein, 284 aa, Zea mays
  misc_feature: Ceres CLONE ID no. 1554291
  misc_feature: Ceres CDNA ID no. 29191604
  misc_feature (196)..(258): Pfam Name: SNARE PFAM Desc: SNARE domain
  misc_feature (38)..(127): Pfam Name: Syntaxin PFAM Desc: Syntaxin
  misc_feature: Homolog of GI Number: 22597174 NR Desc: syntaxin
  misc_feature: Homolog of GI Number: 76573305 NR Desc: syntaxin
  misc_feature: Homolog of GI Number: 21537334 NR Desc: syntaxin
  misc_feature: Homolog of GI Number: 7488213 NR Desc: probable syntaxin
  misc_feature: Homolog of GI Number: 9755735 NR Desc: syntaxin homologue
  misc_feature: Homolog of GI Number: 21595750 NR Desc: syntaxin homologue
  misc_feature: Homolog of GI Number: 30793783 NR Desc: putative syntaxin SYP23
  misc_feature: Homolog of GI Number: 12597869 NR Desc: syntaxin
  misc_feature: Homolog of GI Number: 50911877 NR Desc: putative syntaxin
  misc_feature: Homolog of GI Number: 51536048 NR Desc: putative syntaxin
MSFQDLEAGHVRGAPPGGGRRSGRGDLAGAGAGAGASQAVASGVFQINTAVATFQRLVNTLGTPKDTPDLRDRIHKTRQHITQLVKDTSDKLKQASEADHRVEVSATKKIADAKLAKDFQAVLKEFQKAQRLAAEREAAYAPFISQAGLPQSYNSSEVNNGADRLAEQRTQLLESRRQELVFLDNEIVFNEAIIEERDQGIQEIQHQITEVNEIFKDLAVLVHDQGAMIDDIDSHIENAVVATSQAKGQLSKAAKTQKSNSSLICLLLVIFGVVLLIVIIVLAA

SEQ ID NO: 9695 - DNA, 989 bp, Zea mays
  misc_feature: Ceres CLONE ID no. 1554308
  misc_feature: Ceres CDNA ID no. 36594027
  CDS (82)..(741): REFERENCED BY SEQ ID NO: 9696
gactccgtgagctccctgcctgctgccctgcacactccccgcccagccgcaccagcaccagctcagctcagctcagcagtcatggctcgcccctgcagcagcagcagcagcgccgctgcccgcctcctcctcctgctcgccgccgtcgcagcggcgctccaggccgcgggcgccgcgccgccggtggccagcggcttcatccgcaaatcctgccgcgcgacgcagtacccgtcggtgtgcgagcagagcctcgcggcgtacggaggctccccgccgccgcggagcccgcgggagctggcgcacgccgcgctggcggtgagcgcggaccgcgctcgggcagcgtccgcgtacgtcggccgcctgtgcggctcccggtccggatccggcgacggcagcccccgccgcggcgccggcgcgaagaaggggtcggcggccgcgggtcccgtgcgcgactgtctggagaatctagcggacagcgtgggccacctccgcgacgcggcgcaggagataggcggcgccgggatggcccgcgccgggacgcgcgcgttcaggtggcacctgagcaacgtgcagacctggtgcagcgccgcgctcacggacgagaacacctgcctggacgggctctcgtcccgcgccgtggacgccgccacgcgcgccgccgtccgcggcagggtcgtcgaggtcgcgcaggtcaccagcaacgcgctcgcactcgtcaacaaggtcgggcctgggtactagtagcccagggcggcctgggtgctactactactgcctcctccacgacgttggttgtttctgcctcggcggttaactagttctgttattatcaatgtgtgtgtgtgtttctttgcatataagtatatgctttgtatctgttgtgtgaggtagtttatatatagttaaggccttaagggtaatttgtatattgtattatgggtggcgagaggtacacgaagacggataatccttcttaaaaaaaaaaaaaa

SEQ ID NO: 9696 - protein, 219 aa, Zea mays
  misc_feature: Ceres CLONE ID no. 1554308
  misc_feature: Ceres CDNA ID no. 36594027
  misc_feature (34)..(211): Pfam Name: PMEI PFAM Desc: Plant invertase/pectin methylesterase inhibitor
  misc_feature: Homolog of GI Number: 53792879 NR Desc: ripening
  misc_feature: Homolog of GI Number: 50944277 NR Desc: ripening
  misc_feature: Homolog of GI Number: 50921239 NR Desc: OSJNBb0004G23.9
  misc_feature: Homolog of GI Number: 21618013 NR Desc: putative ripening
  misc_feature: Homolog of GI Number: 6630457 NR Desc: F23N19.14
  misc_feature: Homolog of GI Number: 8809648 NR Desc: ripening
  misc_feature: Homolog of GI Number: 21618088 NR Desc: ripening
  misc_feature: Homolog of GI Number: 7406663 NR Desc: putative ripening
  misc_feature: Homolog of GI Number: 1871577 NR Desc: putative 21kD protein precursor
MARPCSSSSSAAARLLLLLAAVAAALQAAGAAPPVASGFIRKSCRATQYPSVCEQSLAAYGGSPPPRSPRELAHAALAVSADRARAASAYVGRLCGSRSGSGDGSPRRGAGAKKGSAAAGPVRDCLENLADSVGHLRDAAQEIGGAGMARAGTRAFRWHLSNVQTWCSAALTDENTCLDGLSSRAVDAATRAAVRGRVVEVAQVTSNALALVNKVGPGY

SEQ ID NO: 9697 - DNA, 756 bp, Zea mays
  misc_feature: Ceres CLONE ID no. 1554400
  misc_feature: Ceres CDNA ID no. 40352033
  CDS (153)..(488): REFERENCED BY SEQ ID NO: 9698
ggacagtcgagaggaccttttctcgtttttttttatcggctagcaccttgcgacttgcgagcgccgcatcgccggcgagcgccgttccgctgcaccctccgcgattccgccccaacctctgcgttcgaatctcccgcgaaacagtcacggcgatggcggcggccggcggcgtttcaactgatgatgtcccgatcctgcaggcagagaacctcaccagcaacgtcaagtccgtctactacagtcgaacattcttgtcaatcattggtggagttgttgctggaatctggggattcacaggcttgatggggtttgtcttctactttctgataatgatggttgcatctattgggctcttagcgaagtcaaagttttcagtccaggcgtacttcgacagttggaccaggatttcaattgaaggagtttttggtggcctgatgtcattcgtgctgttctggacatttgcttatgacattgttcacatcttctgacggacatagaaagagctactctccagaggaaacacggaatcgtcgacgatgaacattcccaatgggctttttgtacactcaatttttgtattggtaattgatagtctagtgagactatcggtgtagacctaagcaaagctcatgaactggtgttgcatttcctttccttggatgatccgtagcagttgcaatttttcatttcaagtgatggatatgaactttgatgttttctggcacaatgttttgtactctcgaaaaaaaaaaaaaa

SEQ ID NO: 9698 - protein, 111 aa, Zea mays
  misc_feature: Ceres CLONE ID no. 1554400
  misc_feature: Ceres CDNA ID no. 40352033
MAAAGGVSTDDVPILQAENLTSNVKSVYYSRTFLSIIGGVVAGIWGFTGLMGFVFYFLIMMVASIGLLAKSKFSVQAYFDSWTRISIEGVFGGLMSFVLFWTFAYDIVHIF

SEQ ID NO: 9699 - DNA, 626 bp, Zea mays
  misc_feature: Ceres CLONE ID no. 1554428
  misc_feature: Ceres CDNA ID no. 36701842
  CDS (95)..(409): REFERENCED BY SEQ ID NO: 9700
gagtgcagatcacactagcctacacacaccacgctccgtctaaactgacagcaggtcagcagcctagcgaagccaagacatccgccgatctcagatggccgggagaagggtgcgcggcaacagtgccgtggccgtggccgtggccatggtgggcgtcgcgctgctggcgctgctcttcgcggcgagcgaggccgacgggacgtgcaacgtcgaccggggcacggtgctgaggcagtgcgcgtcctgctcgagcggcgcgccgagccaggggtgctgcgacgcgctgaggaacgccgacttcggctgcctctgcagcaactactggaacaagctcaagaacacgccctacgccagctgcgccaaggccatcccttccgcgtgcaacctcccaaacgccaagtgccagtagatggagacatggagtgcgtgacccggacagcgaacgggcagcttggaccaaacagaataaatccgcttcagtccgtagccagccacctgattgtctttgcccgttcattaccctgtttcttcctcctctgagtgtgttagttctttgctttgagtcgttatcgtcgatatgatcgggacgctctatatatgtctttgcaactcaaaaaaaaaaaaaa

SEQ ID NO: 9700 - protein, 104 aa, Zea mays
  misc_feature: Ceres CLONE ID no. 1554428
  misc_feature: Ceres CDNA ID no. 36701842
  misc_feature: Homolog of GI Number: 34906924 NR Desc: P0470A12.42
  misc_feature: Homolog of GI Number: 34906926 NR Desc: P0470A12.43
MAGRRVRGNSAVAVAVAMVGVALLALLFAASEADGTCNVDRGTVLRQCASCSSGAPSQGCCDALRNADFGCLCSNYWNKLKNTPYASCAKAIPSACNLPNAKCQ

SEQ ID NO: 9701 - DNA, 430 bp, Zea mays
  misc_feature: Ceres CLONE ID no. 1554510
  misc_feature: Ceres CDNA ID no. 36706353
  CDS (51)..(332): REFERENCED BY SEQ ID NO: 9702
aatcgggtcagatcgggccatcggggaggcgagggagctcacgcggcgccatggacgaggaggagcacgaggtttacggccaggaaatcccggaggacggcgacatggacggcgctgacgttgatatggctgcctccggggatgacgcggcgaagctgcaggagctcgacgagatgaagcgcaggctgaaggagatggaggaggaagccgccgccctccgcgatatgcaggccaaggtcgccaaggagatgcaaggaggtgaccctagtgcatctacagctgaggcaaaggagcaggtggatgcccgttctgtgtatgttggaaatggctagtgtgcttgagcaagcctttcaaattgactataatggcctaatgggcactgggtgatgttttagagttagcatagagtgaaaaagaaaaaaaaaaaaaa

SEQ ID NO: 9702 - protein, 93 aa, Zea mays
  misc_feature: Ceres CLONE ID no. 1554510
  misc_feature: Ceres CDNA ID no. 36706353
  misc_feature: Homolog of GI Number: 50912961 NR Desc: putative poly
  misc_feature: Homolog of GI Number: 50912963 NR Desc: putative poly
  misc_feature: Homolog of GI Number: 51535367 NR Desc: putative poly
  misc_feature: Homolog of GI Number: 23197620 NR Desc: poly
  misc_feature: Homolog of GI Number: 71834726 NR Desc: 80C09_5
  misc_feature: Homolog of GI Number: 30683122 NR Desc: polyadenylate
  misc_feature: Homolog of GI Number: 28827384 NR Desc: putative polyadenylate
  misc_feature: Homolog of GI Number: 21536704 NR Desc: contains similarity to poly
  misc_feature: Homolog of GI Number: 31210063 NR Desc: ENSANGP00000022901
  misc_feature: Homolog of GI Number: 606751 NR Desc: RNA binding protein
MDEEEHEVYGQEIPEDGDMDGADVDMAASGDDAAKLQELDEMKRRLKEMEEEAAALRDMQAKVAKEMQGGDPSASTAEAKEQVDARSVYVGNG

SEQ ID NO: 9703 - DNA, 856 bp, Zea mays
  misc_feature: Ceres CLONE ID no. 1554524
  misc_feature: Ceres CDNA ID no. 36707308
  CDS (100)..(567): REFERENCED BY SEQ ID NO: 9704
gtgctttcttagaggtgggttggcttctcctccccctccggttcgggttcgggttcgtgaggttctccggggttcgggttcgtgggtgagcggatcgagatggcggcgtcggatgttgagtaccgctgcttcgtcggcggcctcgcctgggccacggacgaccactccctccacaacgccttcagcacctacggcgaggtcctcgagtccaagatcatcctcgatcgggagacgcagaggtcccgcggcttcggcttcgtcaccttctccacggaggaggcgatgcggaacgccatcgagggcatgaacggcaaggagctggacggccgcaacatcaccgtcaacgaggcccagtcccgcggcggccgtggaggcggcggcggtgggtacggtggtggccgtggaggcggcggctacggcggtggtgggcgccgtgatggcggtggcggctacggcggtggcggcggctacggtggcggcggcggctacggtggtggtggcggcggctacggcggtggcaaccgtggcggcggctacggcaactccgacgggaactggaggaactgagcggtggggcccgcgcggccaagttatcctgttcgctaccgtgatgtttaccctagtccagagggtttatcttcgttcgtgtcgtgtttgttgttgcccatctgtgtttttgattgcaaggtcgctctgtgtcagttgttagtgctgtgttcatcctcggtttcagcagacccatgcatcaaacagcatggactgcggatcgatggatgctgttacccccgtcaggctttattctaagttaatcttaaggaaaaaatggtgcttcttggtgctgcaaaaaaaaaaaaaa

SEQ ID NO: 9704 - protein, 155 aa, Zea mays
  misc_feature: Ceres CLONE ID no. 1554524
  misc_feature: Ceres CDNA ID no. 36707308
  misc_feature: The plant flowers significantly late compared to wild-type.
  misc_feature: Useful for making plants with modulated growth and phenotype characteristics
  misc_feature: null
  misc_feature: The sequence is a functional homolog of  SEQ ID NO 1016 in the  11/435,388 US patent application
  misc_feature: Useful for making plants with altered Lignin content
  misc_feature: Useful for making plants with altered alkaloid content
  misc_feature: Useful for making plants with modulated flowering time
  misc_feature: Useful for making plants with modulated nitrogen use efficiency
  misc_feature (48)..(150): Pfam Name: GRP PFAM Desc: Glycine rich protein family
  misc_feature: Homolog of GI Number: 22293 NR Desc: glycine
  misc_feature: Homolog of GI Number: 20257675 NR Desc: glycine
  misc_feature: Homolog of GI Number: 20257691 NR Desc: glycine
  misc_feature: Homolog of GI Number: 20257683 NR Desc: glycine
  misc_feature: Homolog of GI Number: 20257705 NR Desc: glycine
  misc_feature: Homolog of GI Number: 20257693 NR Desc: glycine
  misc_feature: Homolog of GI Number: 20257669 NR Desc: glycine
  misc_feature: Homolog of GI Number: 20257709 NR Desc: glycine
  misc_feature: Homolog of GI Number: 20257719 NR Desc: glycine
  misc_feature: Homolog of GI Number: 20257713 NR Desc: glycine
MAASDVEYRCFVGGLAWATDDHSLHNAFSTYGEVLESKIILDRETQRSRGFGFVTFSTEEAMRNAIEGMNGKELDGRNITVNEAQSRGGRGGGGGGYGGGRGGGGYGGGGRRDGGGGYGGGGGYGGGGGYGGGGGGYGGGNRGGGYGNSDGNWRN

SEQ ID NO: 9705 - DNA, 481 bp, Zea mays
  misc_feature: Ceres CLONE ID no. 1554565
  misc_feature: Ceres CDNA ID no. 25446551
  CDS (83)..(196): REFERENCED BY SEQ ID NO: 9706
tcgggtcttcaagccacaccaaaccacactgcgacacacagtaggcgaggcgaaggagaggcaaggcggcgcggcgggcaagatgtttgacgatcaagacctgggcttctttgccaatttcctgggcatcttcatctttgtcttggttattgcgtaccacttcgtgatggcagacccgaagtacgaaggaaactgatgtcctctagtgcaaagatcctattatctgcaggccgaaatagggctatactgttagctaatgctagtgagatcgcttgacactttgagtgcatatcatggaagctggacatgcagttcctggcattttggttttgcccatgttttaatctgctgaattagtaaatcctggagaattcaaaagcgttttcaagtactgcagttggtggttgtttctggtcctagtgtatgcatgccagaatcttatgaataatattctttgttttgttgccaaaaaaaaaaaaaa

SEQ ID NO: 9706 - protein, 37 aa, Zea mays; identical to SEQ ID NO: 9030
  misc_feature: Ceres CLONE ID no. 1554565
  misc_feature: Ceres CDNA ID no. 25446551

SEQ ID NO: 9707 - DNA, 766 bp, Zea mays
  misc_feature: Ceres CLONE ID no. 1554670
  misc_feature: Ceres CDNA ID no. 40352034
  CDS (1)..(252): REFERENCED BY SEQ ID NO: 9708
cgtcgtccccgccaggtctccgggccgccacttcctcccctcccctcatccgatccgcccgccgcttggagaaggcgcgccactgcgccagggccgcgccatccccgcactctagccgcccgcgctaggcgttcgtcgggctgcgtccaagagccgccagagcgagctcgtgcctgctctcccgccgccagccgccacttggagaaggtgcgccagggccgcaccgtcactgccaggtacgttgaaatctgaacacagcttgcgacacagagggcacacacacctaccctggaccatgaacatgggatgcctcgcatatgattcataatctatgttcatatggaaaaagggttcttcatgatattgcggtggaaagagaagatggatgttaccactgctggcacacttgattctcattcaaagtatctgcatgatgatgagctggccttatggagttatggcccttatggagacagggaaatacctgtgcctattgcctagcctttaaatcgtgtgatggtgttagaaaacaaagaggactgcactgccagcaagatgtgttcatgcacatatagcaggacttgttctaccaacgggtccctggagtgcccgtatagtcaagatgagcttaggtagcaaacaaaaaaaaagtattctcccttttcattctagcagtacatttgcaggaaggaccatgatattctgttttctttcattattatatatatgcacatatagcgatgcaatttctgaaaaaaaaaaaaaa

SEQ ID NO: 9708 - protein, 53 aa, Zea mays
  misc_feature: Ceres CLONE ID no. 1554670
  misc_feature: Ceres CDNA ID no. 40352034
MEKGFFMILRWKEKMDVTTAGTLDSHSKYLHDDELALWSYGPYGDREIPVPIA

SEQ ID NO: 9709 - DNA, 663 bp, Zea mays
  misc_feature: Ceres CLONE ID no. 1554672
  misc_feature: Ceres CDNA ID no. 40352035
  CDS (114)..(335): REFERENCED BY SEQ ID NO: 9710
ggcatttcacaaacgcagagacgtttctcctcgactccgcctcccccgctcctcaccgccgcgccgcctcgtccattgccgccgccgcatcaattgacccccggaccacgcgaatggccgctgaagactcaaaagatatcctaaagaagcgtctcccaaagaaaatcagagaagtccctgactgctattttctccctcgtcgatcatggccttctgcactggcaatctacggtgctgtatgtgctgctagctttggtgcagggatgcttcttgaggtttggataaacaaaaagatcaaagaggacagtggcattgtctgggagatggataaatgatgcaatgcatgctttgttgtggtgaatcccgcgttgtcatcatggacacagctagctctgaagatttctggtggaaattgacacaaccttgtttctgtatctggatctattatgcataatggcagaatgatgtcacaaacctttgagcctcattagtcgaataaactcaaattatccaaacagtataagaaactgttgttccggtgggcactgtcgcctatgcactggtaagcatcagtctgaacatttcttgtttctgatggttcggtggcatgttgtgatcaaatttggtgaacaatgacattttttgttgcaaaaaaaaaaaaaa

SEQ ID NO: 9710 - protein, 73 aa, Zea mays
  misc_feature: Ceres CLONE ID no. 1554672
  misc_feature: Ceres CDNA ID no. 40352035
MAAEDSKDILKKRLPKKIREVPDCYFLPRRSWPSALAIYGAVCAASFGAGMLLEVWINKKIKEDSGIVWEMDK

SEQ ID NO: 9711 - DNA, 1139 bp, Zea mays
  misc_feature: Ceres CLONE ID no. 1554709
  misc_feature: Ceres CDNA ID no. 25402825
  CDS (77)..(991): REFERENCED BY SEQ ID NO: 9712
aattcccaagcaaacagccaaacacacgcgaagaaaaggagatagagtacaggttacagagaggcagagagcaaagatgtgtggtggtgcgatcctcgccgagctcatcccgactacgccggcccgccgcggcggcgcggcgtggcccgccggcaagtgcaagcggcggaaggcggacgacttcgaggccgcgttccgggagttcgacgaggactccgaggaggaggaggaggaggacgagggggtggtggagagcaagcccgccttcgtcgtccgcgcctcgtccgcggcgacgcagcccagggcgcgccaggagcagcggagccggcgccgggcgcccgaccagcagtacaggggcgtccggcgccgcccgtggggcaagtgggccgccgagatccgcgaccccgtcaagggcgtccgcgtctggctcggcaccttcccctccgccgaggccgccgcgcgcgcctacgaccacgccgcgcgccacatccgcgggcccagggccaagctcaacttcccctcctcctccgcctccgccgccggggcccccgccagccgcaagcgcgcccgcgccgccgacgccgtcatcgacctcgaggaacaagagcagcgcccggccgcggcggccctgaagcacgaggccgccgagtgctccggatccgacgcgctcccggacttctcgtggcagggcgtgtcggcggcctacgacgagccccccgcgccgcgcccggccttcgacttcgaggcgcggccggagagcgccgcggacgaggcgtcgccccgggcctccgactccgagtcggacgcgctgttcgactcgctcctcttcggcgaccagttcgccttcttcgacgccggcgcgtacgagtcgctggacagcctgttcagcgccgacgccgtgcagagcaacgccgccgcggcggcggaccaggacatgccgctgtggagcttcgacgacggctgcctcgtcgaggacaacctctcgttttaagcttcggcgactgctgctgtgtcttgagttttgtaaattacgacctgttttttttttagtttctgctcatgtatatctgtatcgatgccgatggtgagctgaatgaaatcatccttgtccggaaggaaaacaaaaaaaaaaaaaaaaa

SEQ ID NO: 9712 - protein, 304 aa, Zea mays
  misc_feature: Ceres CLONE ID no. 1554709
  misc_feature: Ceres CDNA ID no. 25402825
  misc_feature (90)..(153): Pfam Name: AP2 PFAM Desc: AP2 domain
  misc_feature: Homolog of GI Number: 56567587 NR Desc: BTH
  misc_feature: Homolog of GI Number: 60100224 NR Desc: ethylene
  misc_feature: Homolog of GI Number: 50920399 NR Desc: Putative AP2 domain containing transcription factor
  misc_feature: Homolog of GI Number: 78708522 NR Desc: AP2 domain
  misc_feature: Homolog of GI Number: 50920395 NR Desc: Putative AP2 domain containing protein
  misc_feature: Homolog of GI Number: 70905121 NR Desc: root abundant factor
  misc_feature: Homolog of GI Number: 24940524 NR Desc: ethylene response element binding protein
  misc_feature: Homolog of GI Number: 50915322 NR Desc: putative transcription factor EREBP1
  misc_feature: Homolog of GI Number: 18266198 NR Desc: AP
  misc_feature: Homolog of GI Number: 6689918 NR Desc: transcription factor EREBP1
MCGGAILAELIPTTPARRGGAAWPAGKCKRRKADDFEAAFREFDEDSEEEEEEDEGVVESKPAFVVRASSAATQPRARQEQRSRRRAPDQQYRGVRRRPWGKWAAEIRDPVKGVRVWLGTFPSAEAAARAYDHAARHIRGPRAKLNFPSSSASAAGAPASRKRARAADAVIDLEEQEQRPAAAALKHEAAECSGSDALPDFSWQGVSAAYDEPPAPRPAFDFEARPESAADEASPRASDSESDALFDSLLFGDQFAFFDAGAYESLDSLFSADAVQSNAAAAADQDMPLWSFDDGCLVEDNLSF

SEQ ID NO: 9713 - DNA, 1037 bp, Zea mays
  misc_feature: Ceres CLONE ID no. 1554716
  misc_feature: Ceres CDNA ID no. 25446969
  CDS (150)..(716): REFERENCED BY SEQ ID NO: 9714
aactcgtcgcggcagtcggcgctgtcccctcccctcccgccggtcgctgcagtcggcgcccaacccgtccatccgtccgccagagcacatctcacgctgcgggtcgaacagcctgtccgtcaatcaggtttcaggccgacggcggcacgatggcctgccccgccgctaccacggctcgcatcggggcgcggagaggaccgtgcctgtggaggagcgagaggagggccagcttcctcgtccgttccacgtccctgctcccggaccgcccggcccgggacacgagggcgcgcgccgcctcggagctgcagcaagcgcctcgaccagcctccgctaccgtccccgctcacaaggtcaccgtccacgaccgccagcgcggggtcatccacgaattcgtcgtgcccgaggaccagtacattctgcacacggcggaggcgcaggacatcaggctgccgttcgcgtgccgccacggttgctgcacaagctgtgcagtccgaataaaatcaggacagataaggcagcctgaagcacttgggatatctgcagaactaaaagataagggctatgctttgttgtgtgttggtttcccatctggcgatgttgaagtcgagactcaagatgaagatgaggtatattggctccaattcgggagatactttgcacgagggccagtggaaagagatgattacgcgctagaacttgcaatgggagacgaatgagctgtgcctaagagaccttgccatctcaaatttgaataccatctcaaatttggacccctgtagttctgagtatgccgattatctttttgtggctccaaatctcactctcagccttctttccttcggctgttagcgtttagagtgacaaggacacttcctgagaggaggaataaagttctgctctgctctctattttccaggttgcccccttcccgcctttccttgttcggttgtcacttagcagcctggtgcgtggctgcgtgcagttctcgtttctcctctaatagatggcacacgttatgaagaaaaaaaaaaaaaaaa

SEQ ID NO: 9714 - protein, 188 aa, Zea mays
  misc_feature: Ceres CLONE ID no. 1554716
  misc_feature: Ceres CDNA ID no. 25446969
  misc_feature (72)..(148): Pfam Name: Fer2 PFAM Desc: 2Fe
  misc_feature: Homolog of GI Number: 50917871 NR Desc: putative ferredoxin
  misc_feature: Homolog of GI Number: 21281217 NR Desc: putative ferredoxin protein
  misc_feature: Homolog of GI Number: 23127555 NR Desc: COG0633: Ferredoxin
  misc_feature: Homolog of GI Number: 17230411 NR Desc: ferredoxin
  misc_feature: Homolog of GI Number: 75907204 NR Desc: Ferredoxin
  misc_feature: Homolog of GI Number: 16330840 NR Desc: ferredoxin
  misc_feature: Homolog of GI Number: 45526843 NR Desc: COG0633: Ferredoxin
  misc_feature: Homolog of GI Number: 67921722 NR Desc: Ferredoxin
  misc_feature: Homolog of GI Number: 48892970 NR Desc: COG0633: Ferredoxin
  misc_feature: Homolog of GI Number: 71676623 NR Desc: Ferredoxin
MACPAATTARIGARRGPCLWRSERRASFLVRSTSLLPDRPARDTRARAASELQQAPRPASATVPAHKVTVHDRQRGVIHEFVVPEDQYILHTAEAQDIRLPFACRHGCCTSCAVRIKSGQIRQPEALGISAELKDKGYALLCVGFPSGDVEVETQDEDEVYWLQFGRYFARGPVERDDYALELAMGDE

SEQ ID NO: 9715 - DNA, 979 bp, Zea mays
  misc_feature: Ceres CLONE ID no. 1554813
  misc_feature: Ceres CDNA ID no. 40352036
  CDS (119)..(751): REFERENCED BY SEQ ID NO: 9716
ggaccctcacactctgctttatatactgccgaaggtaatcccgttcgcagttcacctacgcggaaaatcactagtgattcgctgaacaaaaaaaattacaagaaggaatcgagagcaaatgctatcatcaaccacactccgaccaccggcgtcgccggcgccggcacacctcaccatctgctcctcgcccgcagcgtggcggcgtgcgccgacggcggcggcggtgcgcgcggtgcggaactacgactccatcccgaagcgggaacccttcagctccagccgcagcatcctccacgagttcctcaggcaggacaagcccctcatccagcgcaccaaggaccagatcacagattattgcacggccatcgaaggcgatgagtgctgcagctgttgggacgcttactttgaactgaataaacttgagcaagagctgcccaaagacgaaatcgcaaggatggtgaaggactcggagggtgacgtgaggtacctgatagagagcatccaccatcgctcggatctgcggaagaaggtggcagagaagtctcgcaattcagtaccgtcaagctcccagggtagtagagccgcgaagccaaggccgttccccgtgcctgatgggataccgaaaacgcaagaagagctcgctgaagaagaagaggcgttgatgccggagtctccgtacacgaggctgctgagaaggatgggaaggtaccctgattggtacaccccacgccctgatcatgagaccgactgaatcgagttgcccaccatcctagtgtcccttgtgggagtttttggagcatggtaatctgaggctccttttatggcctgtgttatgtggtaagattagctttgtatctattgcagtatgcagattagggtgttcttactcttttccaattgtactaatgaaaaccggtgtgtgctttatgctgtaaatatgtgataaatagctgaacgttttattcgaaaaaaaaaaaaa

SEQ ID NO: 9716 - protein, 210 aa, Zea mays
  misc_feature: Ceres CLONE ID no. 1554813
  misc_feature: Ceres CDNA ID no. 40352036
MLSSTTLRPPASPAPAHLTICSSPAAWRRAPTAAAVRAVRNYDSIPKREPFSSSRSILHEFLRQDKPLIQRTKDQITDYCTAIEGDECCSCWDAYFELNKLEQELPKDEIARMVKDSEGDVRYLIESIHHRSDLRKKVAEKSRNSVPSSSQGSRAAKPRPFPVPDGIPKTQEELAEEEEALMPESPYTRLLRRMGRYPDWYTPRPDHETD

SEQ ID NO: 9717 - DNA, 843 bp, Zea mays
  misc_feature: Ceres CLONE ID no. 1554930
  misc_feature: Ceres CDNA ID no. 36707150
  CDS (229)..(576): REFERENCED BY SEQ ID NO: 9718
ggagctcggagcgtcctcctcctcccgtctataaattcccctccttttcttcctccatatataggggccatcagatccaagaagagggaagagcaccattgcaccaaggaccttcggcgcccgttcaggatccacatcttcccgagcgagttcttggttgacctcttcctcttcggaccacctccaaggctcttggtgtagcttgccactctcacaaatcaagttttcatgtctgatctcgacattcagatcccaactgccttcgatcccttcgctgaggccaatgctggggactctggtgcggcagcggggtcaaaggactacgttcacgtgcgcatccagcagcgtaatggtcgcaagagcctgactaccgtccagggattgaagaaggagttcagctacagcaagatcctcaaagatctcaagaaagagttctgctgcaatggtacagtggtccaggacccagaacttggacaggtcattcagctccagggtgatcagaggaagaacgtctcgaatttcctcgtccaggccggcattgtgaagaaggagcacatcaagattcatggtttctgagcaaccgccgggtccatagcaaaccaaccctgcatgcagggccagcttattatatataatatctgaggtggagcatatctatctggctgtgtactacaagcaggcctagtacgccgcctgcgcgttcctcctattacacataacacatatagccccctccctgcgtgtatgcttgttgccgtcgtgtcgaatcttgtactacgaggctccgtcgaacctcgatggcttgcttctttatcagaacatgtttgaataaaaaaaaaaaaa

SEQ ID NO: 9718 - protein, 115 aa, Zea mays
  misc_feature: Ceres CLONE ID no. 1554930
  misc_feature: Ceres CDNA ID no. 36707150
  misc_feature: The plant flowers significantly earllier than wild-type.
  misc_feature: The plant is abnormally small.
  misc_feature: null
  misc_feature: Useful for making plants with modulated biomass
  misc_feature: Useful for making plants with modulated flowering time
  misc_feature (27)..(108): Pfam Name: SUI1 PFAM Desc: Translation initiation factor SUI1
  misc_feature: Homolog of GI Number: 2668740 NR Desc: translation initiation factor
  misc_feature: Homolog of GI Number: 50937977 NR Desc: translational initiation factor eIF1
  misc_feature: Homolog of GI Number: 6478142 NR Desc: putative translation initiation factor eIF
  misc_feature: Homolog of GI Number: 21070377 NR Desc: translation initiation factor
  misc_feature: Homolog of GI Number: 53791638 NR Desc: putative translation initiation factor
  misc_feature: Homolog of GI Number: 20218809 NR Desc: putative translation factor
  misc_feature: Homolog of GI Number: 28193048 NR Desc: SUI1 protein
  misc_feature: Homolog of GI Number: 28193050 NR Desc: SUI1 protein
  misc_feature: Homolog of GI Number: 3334346 NR Desc: Protein translation factor SUI1 homolog
MSDLDIQIPTAFDPFAEANAGDSGAAAGSKDYVHVRIQQRNGRKSLTTVQGLKKEFSYSKILKDLKKEFCCNGTVVQDPELGQVIQLQGDQRKNVSNFLVQAGIVKKEHIKIHGF

SEQ ID NO: 9719 - DNA, 603 bp, Zea mays
  misc_feature: Ceres CLONE ID no. 1554934
  misc_feature: Ceres CDNA ID no. 36691521
  CDS (165)..(419): REFERENCED BY SEQ ID NO: 9720
cgtgtttaccgacgccaccggccgcctgtatttcctcacccaactccgtccctctctcccagcccagatagatctttcccccgtcctccctcgccttcgcctcgccggcaggagatttccaccaccaccgccggaccaccccgaccctccttccctctcgcgctatggcccagactgttgtgctcaaggttggcatgtcctgtgagggctgtgttggagctgtcaagcgggtcctgggcaagatggaaggcgtcgagtcctacgacgtagacatcatggaacagaaggtcaccgtgaagggcaatgtgacacctgacgccgtcctgcaaactgtttccaagactggcaagaagacttcgttctgggaggctgaggccgtgacaagtgaatccgccacacctgccggcgccaccgcctgacaggttcgatgatctggaagtgcccagcaaaaaaatgtgaatgtatttagcttggatctgttacaaataattgcaaactgctagctcggtctgtacattttacagttgctatttgtatactgtgatgttctcgtatgtttgtggaggcgataaaccaatatttgtatgataaaaaaaaaaaaaa

SEQ ID NO: 9720 - protein, 84 aa, Zea mays
  misc_feature: Ceres CLONE ID no. 1554934
  misc_feature: Ceres CDNA ID no. 36691521
  misc_feature (5)..(66): Pfam Name: HMA PFAM Desc: Heavy
  misc_feature: Homolog of GI Number: 47176684 NR Desc: copper chaperone
  misc_feature: Homolog of GI Number: 50942155 NR Desc: putative copper chaperone
  misc_feature: Homolog of GI Number: 18655401 NR Desc: At1g66240/T6J19_6
  misc_feature: Homolog of GI Number: 30039180 NR Desc: copper chaperone
  misc_feature: Homolog of GI Number: 21553785 NR Desc: copper homeostasis factor
  misc_feature: Homolog of GI Number: 56202338 NR Desc: putative copper chaperone
  misc_feature: Homolog of GI Number: 53748477 NR Desc: copper chaperone
  misc_feature: Homolog of GI Number: 50909185 NR Desc: copper chaperone homolog CCH
  misc_feature: Homolog of GI Number: 6525011 NR Desc: copper chaperone homolog CCH
  misc_feature: Homolog of GI Number: 34906086 NR Desc: P0459B04.21
MAQTVVLKVGMSCEGCVGAVKRVLGKMEGVESYDVDIMEQKVTVKGNVTPDAVLQTVSKTGKKTSFWEAEAVTSESATPAGATA

SEQ ID NO: 9721 - DNA, 634 bp, Zea mays
  misc_feature: Ceres CLONE ID no. 1555048
  misc_feature: Ceres CDNA ID no. 40352037
  CDS (139)..(528): REFERENCED BY SEQ ID NO: 9722
ggattggcacacgctttcctttcctgcagacaagctgtaaatctcgcctagctcgtcgtcggagagcaaggagaagagcaagggggcgcagaggcagaggcagaggcttgcctaccttacctagctcgtcggggccctatggagatccagcaccaccgggggctgggcaactccaaggttgtcaaggtgcagagcgaggaggcgtgggatctgttcaccgatcaagcgagcaacgaaggccggcccgttgttgcccatttcggagcgtcatggtgcgtgacgtccctgtccatgaactacaagtttgaggagctggcgcagacccaccccgaggtcttgttcctctacgtggacgtcgacgatgtccagagtgtttcatccaggtacggagtgaaggccatgccgacgttcttcctcatcaagagcaaggaggtggtggggaagatcgtcggggcgaacccagacgaggtgaagaagctggtggatgcttccgccgaacccttggagactcagatagtcgtggagtagtagtcgtttcagactttttttttttttgaagagtcgttcgtgtcttccgaaactgctccgcgagactgtgcgaccgtgagtgcttcttggtcaaaaaaaaaaaaaa

SEQ ID NO: 9722 - protein, 129 aa, Zea mays
  misc_feature: Ceres CLONE ID no. 1555048
  misc_feature: Ceres CDNA ID no. 40352037
  misc_feature (14)..(120): Pfam Name: Thioredoxin PFAM Desc: Thioredoxin
MEIQHHRGLGNSKVVKVQSEEAWDLFTDQASNEGRPVVAHFGASWCVTSLSMNYKFEELAQTHPEVLFLYVDVDDVQSVSSRYGVKAMPTFFLIKSKEVVGKIVGANPDEVKKLVDASAEPLETQIVVE

SEQ ID NO: 9723 - DNA, 846 bp, Zea mays
  misc_feature: Ceres CLONE ID no. 1555105
  misc_feature: Ceres CDNA ID no. 36707310
  CDS (90)..(560): REFERENCED BY SEQ ID NO: 9724
agaggtgggttggctcctcctccccctccggttcgggttcgggttcgtgaggttctccggggttcggtttcgtgggtgagcggatcgagatggcggcgtcggatgttgagtaccgctgcttcgtcggcggcctcgcctgggccacggacgaccactccctccacaacgccttcagcacctacggcgaggtcctcgagtccaagattatcctcgatcgggagacgcagaggtcccgcggcttcggcttcgtcaccttctccacggaggaggcgatgcggaacgccatcgagggcatgaacggcaaggagctggacggccgcaacatcaccgtcaacgaggcccagtcccgcggcggccgtggaggcggcggcggcggctacggtggtggccgtggaggcggcggctacggcggtggcgggcgccgtgatggcggcggcggctacggcggtggcggcggcggctacggtggcggcggtggctacggtggtggtggtggcggctacggcggtggcaaccgtggcggcggctacggcaactccgacgggaactggaggaactgagcggtggggcccgcgcggccaagttatcctgttcgctaccgtgatgtttaccctagtccagagggtttatcttcgttcgtctcgtttgttgttgcccatctgtgtttttgattgcaaggtcgctctgtgtcagttgttagtgctgtgttcatcctcggctccagcagacccatgcatcaaccagcatggactgtggatcgatggatgctgttactcctgtcaggatttgttctaagttaatcctaaggaaaaaatggtgcttcttggtgctgcaaaaaaaaaaaaa

SEQ ID NO: 9724 - protein, 156 aa, Zea mays; identical to SEQ ID NO: 8912
  misc_feature: Ceres CLONE ID no. 1555105
  misc_feature: Ceres CDNA ID no. 36707310
  misc_feature: The plant flowers significantly late compared to wild-type.
  misc_feature: Useful for making plants with modulated growth and phenotype characteristics
  misc_feature: null
  misc_feature: The sequence is a functional homolog of  SEQ ID NO 1016 in the  11/435,388 US patent application
  misc_feature: Useful for making plants with altered Lignin content
  misc_feature: Useful for making plants with altered alkaloid content
  misc_feature: Useful for making plants with modulated flowering time
  misc_feature: Useful for making plants with modulated nitrogen use efficiency
  misc_feature (48)..(151): Pfam Name: GRP PFAM Desc: Glycine rich protein family
  misc_feature: Homolog of GI Number: 22293 NR Desc: glycine
  misc_feature: Homolog of GI Number: 20257675 NR Desc: glycine
  misc_feature: Homolog of GI Number: 20257691 NR Desc: glycine
  misc_feature: Homolog of GI Number: 20257683 NR Desc: glycine
  misc_feature: Homolog of GI Number: 20257705 NR Desc: glycine
  misc_feature: Homolog of GI Number: 20257693 NR Desc: glycine
  misc_feature: Homolog of GI Number: 20257669 NR Desc: glycine
  misc_feature: Homolog of GI Number: 20257709 NR Desc: glycine
  misc_feature: Homolog of GI Number: 20257719 NR Desc: glycine
  misc_feature: Homolog of GI Number: 20257713 NR Desc: glycine

SEQ ID NO: 9725 - DNA, 648 bp, Zea mays
  misc_feature: Ceres CLONE ID no. 1555231
  misc_feature: Ceres CDNA ID no. 40352038
  CDS (105)..(350): REFERENCED BY SEQ ID NO: 9726
tgcaaacaccccgtgcacaaccaattccccatcgagacatcggtccgtccgtacgaatccctgcgctcaacgccgcaccgaacctgactcaggcactcaccgctatgggcggcgaccatggcggtgggcacgccggcggtgacttccgccagaaggtatggagcatgacgggcggaccctactgccgcccggtccactggcgccgtaacaccgccatcgccatgttcggcgtcttcctcatctgcattcccatagccatgaagtccgccgagctcgagcaacgcccgcatcacccagtccggccaatcccatctcaactgtggtgcaaaaactttggcaaggaatactgaaggaccttccaagtagcatgaagcgcggacaccttgcttttgccttcttttgattctctttctcttttggctcaatcatgttatatgagaaataaaataaatattggactcaaataagaaaccggtgattcaaaagcctctgatgaatttacttgtccacgaattttggttatatttctctgctattttctttcttatttgattctctgctattttctctcttatttgaaacaaccaatgacaatgttataagttttggttatatttctagtaaattatgtttcaaaaaaaaaaaaaa

SEQ ID NO: 9726 - protein, 81 aa, Zea mays
  misc_feature: Ceres CLONE ID no. 1555231
  misc_feature: Ceres CDNA ID no. 40352038
MGGDHGGGHAGGDFRQKVWSMTGGPYCRPVHWRRNTAIAMFGVFLICIPIAMKSAELEQRPHHPVRPIPSQLWCKNFGKEY

SEQ ID NO: 9727 - DNA, 800 bp, Zea mays
  misc_feature: Ceres CLONE ID no. 1555309
  misc_feature: Ceres CDNA ID no. 40352039
  CDS (1)..(258): REFERENCED BY SEQ ID NO: 9728
cgtttattccacgccgcaccgtcctttccagaaccctctggtctccgcgtgcggcggcgcgatttctttgcttctcccttccacttcgagagattgttgattattctagagccagatccgggtaacagattcgagtttgcgcccgccctgttcggcttcagccgccaaactgccagacgcacagccgcggagccgccagagacagacgctgccgccgtcggccgtcctccgccctccaggcattgcaaggtaatctaaatattataggacaggtggtgcagcggtgagggtctcactgagtcaccaggtttcaaagcagccttttcgcatttgcgggggaacgctcatcttggtttatcccttccccaaacctccctcgtgtgggagcctctgacactggatatggggaacactacatctgtgcaagctgaggcttcagattcagcgcagaaacctgccacaacagctcctgcacctgggtcaaagccgaaaaagatctgctgtgcttgcccagatacaaagaagctgagggacgattgcatcgtgcagaatggcgaggatgcctgcggaaagctcatcgaagcccacctgaaatgcctgagagccgaagggttcagcgtctgacgtggtgctccatcatggcaactccacacacctgtttctgcagtaatctgattttgatcatgaacagtgtgatgaataaggacttctggtagagtgatagaaacaactcgcagttttatttctagactggaaggaggaaatcccctgaacattgccagtttgcaaaaaaaaaaaaa

SEQ ID NO: 9728 - protein, 73 aa, Zea mays; identical to SEQ ID NO: 700
  misc_feature: Ceres CLONE ID no. 1555309
  misc_feature: Ceres CDNA ID no. 40352039
  misc_feature (11)..(73): Pfam Name: COX17 PFAM Desc: Cytochrome C oxidase copper chaperone

SEQ ID NO: 9729 - DNA, 841 bp, Zea mays
  misc_feature: Ceres CLONE ID no. 1555376
  misc_feature: Ceres CDNA ID no. 36698254
  CDS (71)..(547): REFERENCED BY SEQ ID NO: 9730
taccaatccccatcgccccagaccacagccagtgcgacagtgaagaaggagggaggacaagaagaagccgatggcggttgtgagcggcagcggcgggaggctgaacccctgggcggagcccttcgtgccttccggggcgcggtaccgcggcctgcggaccgtggaggcgacgccggagcaggaggtggaggacttctcccccgagtggtggcgcctggtgtccgcctccccggccttccgcgaccgctggctgcgcgagtacggcgcgctcggcctactcgacgccgaggacgacctggacgacgacgtcgacagcttcctccccgacgacttcttctcgcctccggccccgcgctacgagagcgagcgggaggacgccgcgggcaggagggcgggccgagggcttgaggtggcggcgtggggcatcgacaggtggtggagggcgcacggtgggccgccggagaccccgaggtacgcggagaaggcgccgcggagggtggccgccgccgccagggtgagcccccgccccatccagcagccgcgctgaaggaccagatccgttcatccaccgacggcgacggctgctcagtcagtgtcacatcttggcacggggggaaaaataggcacgaaaaaaaaagagttccctttcttgaatcgatgcagtttgctttggtgttcgtctcgcgcagtttctggatctgggctccgcttcagctcgagatcgactgggatgggaagatcctctgctgcgttgtcttgtctgtgctcatccgtgtgtactgtgtaaatatgaagatgtaataacaaaaacacgcattttagctttcaaaaaaaaaaaaaa

SEQ ID NO: 9730 - protein, 158 aa, Zea mays
  misc_feature: Ceres CLONE ID no. 1555376
  misc_feature: Ceres CDNA ID no. 36698254
  misc_feature: Homolog of GI Number: 8489786 NR Desc: dehydration
  misc_feature: Homolog of GI Number: 33415266 NR Desc: poly
  misc_feature: Homolog of GI Number: 56481323 NR Desc: early response to dehydration 15
  misc_feature: Homolog of GI Number: 56481295 NR Desc: early response to dehydration 15
  misc_feature: Homolog of GI Number: 56481331 NR Desc: early response to dehydration 15
  misc_feature: Homolog of GI Number: 33415268 NR Desc: poly
  misc_feature: Homolog of GI Number: 21592689 NR Desc: ERD15 protein
  misc_feature: Homolog of GI Number: 20197424 NR Desc: ERD15 protein
MAVVSGSGGRLNPWAEPFVPSGARYRGLRTVEATPEQEVEDFSPEWWRLVSASPAFRDRWLREYGALGLLDAEDDLDDDVDSFLPDDFFSPPAPRYESEREDAAGRRAGRGLEVAAWGIDRWWRAHGGPPETPRYAEKAPRRVAAAARVSPRPIQQPR

SEQ ID NO: 9731 - DNA, 673 bp, Zea mays
  misc_feature: Ceres CLONE ID no. 1555388
  misc_feature: Ceres CDNA ID no. 36691522
  CDS (128)..(541): REFERENCED BY SEQ ID NO: 9732
gttacctttaccactgcagcccaattccaaccccagctttgactgccctcgcttggtgctcagttctttcctctgctcctccgcctcttctcgcacctcggcaccttcttcggcaactgcgagcgagatggaggcgcaagacgactgcaagtggcggcagatcccggcgttcggcgactggaacgtgtgggacggcgacatgcccgtcacccagtacttccaggcaggggccttcttcttcgcggcgccggcggagaagggcgacgcggatctcttcaaggtgccccagttgcctgccaagccctacggctacaagaagtgcgttgttcgagtgaagggggagaaagaaaccgctgtgccgccggcggcgaggaagggacgcaggaggcgctgcgtgagcgagcagcacaagtggaagcccaagggagctgtggacgaggacctgtacaagatctccccgcagcttctctgcaaggtgaagaagaagaagctgctgaggaatttgcttggagggtgcctcggcttgggctgcatcgcctgatagtgagagatgcagagcttaataagtttcttgaaagttcgcttgcttggtgctctggagagagttgtatagttgtctacgctaatatgagattaatggaaacttactactgcttctgcaaaaaaaaaaaaa

SEQ ID NO: 9732 - protein, 137 aa, Zea mays
  misc_feature: Ceres CLONE ID no. 1555388
  misc_feature: Ceres CDNA ID no. 36691522
  misc_feature: Homolog of GI Number: 34906922 NR Desc: P0470A12.41
MEAQDDCKWRQIPAFGDWNVWDGDMPVTQYFQAGAFFFAAPAEKGDADLFKVPQLPAKPYGYKKCVVRVKGEKETAVPPAARKGRRRRCVSEQHKWKPKGAVDEDLYKISPQLLCKVKKKKLLRNLLGGCLGLGCIA

SEQ ID NO: 9733 - DNA, 565 bp, Zea mays
  misc_feature: Ceres CLONE ID no. 1555531
  misc_feature: Ceres CDNA ID no. 36706895
  CDS (128)..(424): REFERENCED BY SEQ ID NO: 9734
atcacgctttaccactgcagtgaaaaacgtacgtggccaagctatcagtagcgtatccacacaaagaggttgcagcggcagccagccagccgtcgagcgggtgtccggtagccggcgagcgcgaggcatgtgcaacgggcgggagtgcgggcgcgagcgcgcgttccgcgcctccctgcacgagcgcgacgcgaggccgaggccagggccggagccggcggcggcagctgcgcctgcgtgccggcacgacgcgaagacggaggagggcgagacggtggcgacgttgcgggccaagggggaggggcgcgcgcggacggccggggaggagcgcaatcaggagtggaggcagaggcctcggcttcgggaggcggagattgagaggacggagaaactgatgcacctgctcctttggggacccaactgaccgtcgcagtcgcacagtcgcactgaaccccgatctggtcgtctggagggggtcgtggcttttcgcgtcgcgtgcgtgccttggtgaattatacgacgcaggaacagccttgtttggcagtttcaacaaaaaaaaaaaaaa

SEQ ID NO: 9734 - protein, 98 aa, Zea mays
  misc_feature: Ceres CLONE ID no. 1555531
  misc_feature: Ceres CDNA ID no. 36706895
  misc_feature: Homolog of GI Number: 66780099 NR Desc: PE
MCNGRECGRERAFRASLHERDARPRPGPEPAAAAAPACRHDAKTEEGETVATLRAKGEGRARTAGEERNQEWRQRPRLREAEIERTEKLMHLLLWGPN

SEQ ID NO: 9735 - DNA, 741 bp, Zea mays
  misc_feature: Ceres CLONE ID no. 1555551
  misc_feature: Ceres CDNA ID no. 29191589
  CDS (96)..(332): REFERENCED BY SEQ ID NO: 9736
ggagcagggcaggggcaggttgcatttgcatctgagttcctgattgttgtattccagtttcttctgtgagttttgtgggatcgcgaggaggaaggatgtcgtgctgcggaggcaactgcgggtgcggcgccggctgcaagtgcggcagcggctgcggagggtgcaagatgtacccggatatggctgagcaggtgaacaccaccaccaccacccagactctcatcatgggtgttgcaccatccaagggcgggttcgaggcggccgccggagctgagaacggcgggtgcaagtgcggcgccaactgcacctgcgacccctgcacctgcaagtgagacgacgacggcgatgctgctgcagggtctgcagggcgtgatggggtcctcggaaggactctttatctctagctaattattctagcagtgctaataagctctagtatataatattctagcagtgtcgtttgttgtgttttgttcgagtcagtcagacagtcagccgcgtgtgccatgggccatggcatagcatgcctcgctctatctgctccatcgccttgttctagtggtggtactgatgggggaacgaataattgtaccgagatgttggcgccgtgtcgtgtcgtgtcctgtcctgtccttcctggggctcatatagcagtcagactgtgttgtgttgtgctgtgtgggccgagtgtgcagtacagcatcaggccatgccccctgttccatctaaaaaaaaaaaaaa

SEQ ID NO: 9736 - protein, 78 aa, Zea mays
  misc_feature: Ceres CLONE ID no. 1555551
  misc_feature: Ceres CDNA ID no. 29191589
  misc_feature (1)..(77): Pfam Name: Metallothio_2 PFAM Desc: Metallothionein
  misc_feature: Homolog of GI Number: 55416162 NR Desc: metallothionein
  misc_feature: Homolog of GI Number: 46358913 NR Desc: metallothionein
  misc_feature: Homolog of GI Number: 32400768 NR Desc: metallothionein
  misc_feature: Homolog of GI Number: 13491970 NR Desc: metallothionein
  misc_feature: Homolog of GI Number: 56549629 NR Desc: metallothionein
  misc_feature: Homolog of GI Number: 23954357 NR Desc: metallothioneine type2
  misc_feature: Homolog of GI Number: 46850185 NR Desc: metallothionein 2a
  misc_feature: Homolog of GI Number: 15825501 NR Desc: type 2 metallothionein
  misc_feature: Homolog of GI Number: 71040683 NR Desc: type 2 metallothionein
  misc_feature: Homolog of GI Number: 74476676 NR Desc: type 2 metallothionein
MSCCGGNCGCGAGCKCGSGCGGCKMYPDMAEQVNTTTTTQTLIMGVAPSKGGFEAAAGAENGGCKCGANCTCDPCTCK

SEQ ID NO: 9737 - DNA, 1014 bp, Zea mays
  misc_feature: Ceres CLONE ID no. 1555686
  misc_feature: Ceres CDNA ID no. 40352040
  CDS (142)..(732): REFERENCED BY SEQ ID NO: 9738
aaaaaaaaaagtccgtggctttgcatctgcaaccccgcccgatcaatcttcctcgttccgccgctccctcgcctccggcagcgaggtgaggccaccgatcggaccttccctagcggcggcgcctaccaacctcaaggagcgatggctctgtctgcgacgctacggatttctcttagcgtcgcgttctttggggttctggcgttcgtgcttggtgtcatcgccgaaaacaaaaagcctgcttccgggactcctatcctaggaaaggatgtcgtcatctgcacgtttccaagtgatccgactcttgcgatggggagcctgtccattgtggcacttgtggtagctgccatcgtaggccatgttgccatcttctttccatactcgggcaagtcagttcctcgtggagcgctgtttcaaagcaccagcttgacagtgttctttgttgttgctgagcttgtctcagccctggctcttgcaatgtcgctgtgggcaactgtcaccgagggtcttcaccgcagcaagaacatccaccacgacatggactaccagtgccctactgccaagaccggcctgttcggcggcgccgctttcctcgcccttgacgctgctctcttctggcttgtttgccagatgctggccctcaatgcaagggctgactaccttgacgaggatgacggcaagggagaatatggccagatttatgctgctcaagtcgatgatggctcgaaggtctgagcctatgtggtcatgctcggcagggttctatgattagtgtcatttggctacattatgccatcaacaaagtcgctttagctctcagtaaatttgtatataagttgcaaagtcttacataaggctggtggttattgcactttcgtgtttcagtgtgatcgataaacagtatctcagtacaatcggtttgctatgccccttggcgaacttgtccttgagttttctggtgtctgaatggcactataatataatatactccctctgttccaaaaaaaaaaaaaaaaa

SEQ ID NO: 9738 - protein, 196 aa, Zea mays; identical to SEQ ID NO: 8554
  misc_feature: Ceres CLONE ID no. 1555686
  misc_feature: Ceres CDNA ID no. 40352040

SEQ ID NO: 9739 - DNA, 1659 bp, Zea mays
  misc_feature: Ceres CLONE ID no. 1555851
  misc_feature: Ceres CDNA ID no. 25447476
  CDS (51)..(1400): REFERENCED BY SEQ ID NO: 9740
atagaaaaactggccacccatccgatcccacccggcagcggcgctgcgcaatggccacccacgcagctctcgccgcctcccgcatccccgccggcgcccggctgcacagcagggcgccggcgtcgtccaggcacggcgtgcagaggctggacttcgccgacttctccgggctcaggccggggtcgtgctccgtgagcgctgccgcgcgggaggcgtccttctccgacgtccttggcgcgcagctcgtcgccaaggccaccggggagaacgccgtgagggcgcccgcagaggcgaagctgaaggtggcgatcaacggcttcggccgcatcggccggaacttcctccggtgctggcacggccgcgaggactcgccgatcgacgtcgtcgtcgtgaacgacagcggaggcgtcaggaacgcgtcccacctcctcaagtacgactcgatgctcggcaccttcaaggccgacgtcaagatcgtggacgacacgaccatcagcgtcgacggcaagcccatcacggtcgtctccagcagggacccgctcaagctcccatggggtgagctcggcattgacatcgtcatcgagggcaccggagtcttcgtcgacggccccggcgccggcaagcacatccaggccggcgcgaagaaggtgatcatcacggctcccgccaagggcgccgacatcccgacctatgtcgtcggcgtcaacgagggcgactacgaccacagcgtcgccgacatcatcagcaacgcgtcctgcacgaccaactgcctcgcgccattcgtcaagatcttggacgaggagttcggaatcgtgaaggggaccatgacgacgacgcactcgtacaccggcgaccagaggctgctggacgcgtcccaccgcgacctccggcgggcccgcgcggcggcgctgaacatcgtgccgacgagcacgggcgccgccaaggccgtggcgctggtgctgccgcagctcaaggggaagctgaacggcatcgcgctgcgggtgccgaccccgaacgtgtccgtggtggacctggtgatcaacaccgtgaagactggcatcacggccgacgacgtgaacgcggcgttccgcaaggccgccgccggcccgctgcagggcatcctggaggtctgcgacgtgccgctcgtgtccgtcgacttcaggtgctccgacgtgtcctgcaccatcgacgcgtcgctcagcatggtcatgggcgacgacatggtcaaggtcgtcgcctggtacgacaacgagtgggggtacagccaacgcgtggttgatctggcgcacctggtggcggccaagtggcccggcgcggcggcggccggcagcggcgaccctctggaggacttctgcaaggacaaccccgagaccgacgagtgcaaggtgtacgaagcatgaggccagggttctttccacgacgaaacgtacagcacgggcgcgagggttctttccatagagaataatatacagattattcgacgaaagagacgtatgttatatatatatatgagttgtatgcagtcaccgaactggcggtacaggcttccgctttccatttcctgttgggagtcgtgtagtgtaatcctggggtgtgtatttgtttcatcaaccatgcctgccgatttgaatctcgtttcacctaaaaaaaaaaaaaaaa

SEQ ID NO: 9740 - protein, 449 aa, Zea mays
  misc_feature: Ceres CLONE ID no. 1555851
  misc_feature: Ceres CDNA ID no. 25447476
  misc_feature (241)..(398): Pfam Name: Gp_dh_C PFAM Desc: Glyceraldehyde 3
  misc_feature (429)..(449): Pfam Name: CP12 PFAM Desc: CP12 domain
  misc_feature (83)..(236): Pfam Name: Gp_dh_N PFAM Desc: Glyceraldehyde 3
  misc_feature: Homolog of GI Number: 50948907 NR Desc: EST C74302
  misc_feature: Homolog of GI Number: 120665 NR Desc: Glyceraldehyde
  misc_feature: Homolog of GI Number: 336390 NR Desc: glyceraldehyde 3
  misc_feature: Homolog of GI Number: 66027 NR Desc: glyceraldehyde
  misc_feature: Homolog of GI Number: 66028 NR Desc: glyceraldehyde
  misc_feature: Homolog of GI Number: 82166 NR Desc: glyceraldehyde
  misc_feature: Homolog of GI Number: 18076102 NR Desc: glyceraldehyde
  misc_feature: Homolog of GI Number: 870796 NR Desc: glyceraldehyde
  misc_feature: Homolog of GI Number: 26986729 NR Desc: glyceraldehyde
  misc_feature: Homolog of GI Number: 18076098 NR Desc: glyceraldehyde
MATHAALAASRIPAGARLHSRAPASSRHGVQRLDFADFSGLRPGSCSVSAAAREASFSDVLGAQLVAKATGENAVRAPAEAKLKVAINGFGRIGRNFLRCWHGREDSPIDVVVVNDSGGVRNASHLLKYDSMLGTFKADVKIVDDTTISVDGKPITVVSSRDPLKLPWGELGIDIVIEGTGVFVDGPGAGKHIQAGAKKVIITAPAKGADIPTYVVGVNEGDYDHSVADIISNASCTTNCLAPFVKILDEEFGIVKGTMTTTHSYTGDQRLLDASHRDLRRARAAALNIVPTSTGAAKAVALVLPQLKGKLNGIALRVPTPNVSVVDLVINTVKTGITADDVNAAFRKAAAGPLQGILEVCDVPLVSVDFRCSDVSCTIDASLSMVMGDDMVKVVAWYDNEWGYSQRVVDLAHLVAAKWPGAAAAGSGDPLEDFCKDNPETDECKVYEA

SEQ ID NO: 9741 - DNA, 1034 bp, Zea mays
  misc_feature: Ceres CLONE ID no. 1555868
  misc_feature: Ceres CDNA ID no. 25446552
  CDS (187)..(660): REFERENCED BY SEQ ID NO: 9742
agcgcctgccctcccctcctgcagcgcccgtcgcctccctttccccttccctccctccctctccccgcgggccgccagaggcaatttcgccctcgattcgaccccgattcgtccgcccgcgaccgggattccctccgccaagcgcggatctgaacgctgcgctccgtgtcgccgctcgaatccgccatgaagggggccaaatccaagggcgccgccaaggccgatgccaagctggcggtgaagagcaagggggcggagaagcccgccaagggcaggaaagggaaggccggcaaggaccccaacaagcctaagagggctcccagcgctttcttcgtgttcatggaggaatttcgcaaggagttcaaggagaagaaccctaagaacaagtctgtcgctgcggtggggaaagctgctggcgacaggtggaaatccctgagcgagtcggacaaggctccctatgtagccaaggctaacaagctcaagctcgagtacaacaaggccatcgctgcctacaacaagggcgagagcactgcagctaagaaggctcctgccaaggaggaagaggaggaagatgaagaggagtctgacaagtccaagtcggaggtcaatgacgaggatgatgaagagggtagtgaggaggatgaagatgatgacgagtgatggagctcctcgagacaatggaccgtgcttcatccaacaatggagcggctacacaaggccccgtggcgatcacaaaaaaggagcctatatccatgtactagaattattcagtttcactccacatcgtgatgttttatttttacttttgtcgtgctataacggatagcgctcctcgttggcgccactggcgggtggttctgcctctggtctggtgtgtttgtgtgtggtcacacttgccagccagcagaggcgcctgcttgtacctagattactgtttccattgtcgtcatcatcggctaacattgtcataatgtcagtttgggtaatgttagattaagtaattattgtgttctgtagtaaaaaaaaaaaaaaaa

SEQ ID NO: 9742 - protein, 157 aa, Zea mays
  misc_feature: Ceres CLONE ID no. 1555868
  misc_feature: Ceres CDNA ID no. 25446552
  misc_feature (41)..(110): Pfam Name: HMG_box PFAM Desc: HMG
  misc_feature: Homolog of GI Number: 397396 NR Desc: DNA
  misc_feature: Homolog of GI Number: 22347617 NR Desc: nucleosome/chromatin assembly factor group D protein
  misc_feature: Homolog of GI Number: 30267833 NR Desc: HMGB1
  misc_feature: Homolog of GI Number: 21803 NR Desc: high mobility group protein
  misc_feature: Homolog of GI Number: 950053 NR Desc: HMG1/2
  misc_feature: Homolog of GI Number: 47027098 NR Desc: HMG transcription factor
  misc_feature: Homolog of GI Number: 25402921 NR Desc: protein F2D10.18
  misc_feature: Homolog of GI Number: 18645 NR Desc: HMG
  misc_feature: Homolog of GI Number: 1052956 NR Desc: high mobility group protein 2 HMG2
  misc_feature: Homolog of GI Number: 51708316 NR Desc: similar to 3
  misc_feature: Useful for making ornamental plants with modified leaves
  misc_feature: Useful for making plants with increased biomass and foliage
  misc_feature: Useful for making stronger plants
  misc_feature: Useful for making taller plants and plants with longer flowers
  misc_feature: Useful for making taller plants and plants with longer inflorescences
  misc_feature: Useful for sterility
MKGAKSKGAAKADAKLAVKSKGAEKPAKGRKGKAGKDPNKPKRAPSAFFVFMEEFRKEFKEKNPKNKSVAAVGKAAGDRWKSLSESDKAPYVAKANKLKLEYNKAIAAYNKGESTAAKKAPAKEEEEEDEEESDKSKSEVNDEDDEEGSEEDEDDDE

SEQ ID NO: 9743 - DNA, 937 bp, Zea mays
  misc_feature: Ceres CLONE ID no. 1555931
  misc_feature: Ceres CDNA ID no. 25447081
  CDS (174)..(791): REFERENCED BY SEQ ID NO: 9744
aaaggccgacaaacggcgaccaggcaggcgagctcgtcgcctcgggggcagggaggaccggagcccctcgcctcggaggaagggaggacctgagctttatgatcaagcaggagctctgattaacagaattttttgaattctccccaaattgaagggtgcacctgaagggagttatggatcggaagaatcaaactcctcaaggtcaaatagcacaggtggttgtggaatttcttgaggtagcaatcagctgcatcgtcttcctcaaaggcttctatcctcctcgtgcctttgagaggagaaggtacatgaatgtggtggtccagaaagcactgcatcctgagcttactagctatattcactctgtgactttcggtcttctacctttcattcagaagggattggtagagagggtcgtggtcatcttctatgacaaagggcatgtaccgaccgagaagttcgtcttcaagcttgcagtcaaccagtcataccgttccaagttagaggaggcgaacctggagttcgctctgcgagcattcttgatcaggctgactgttgctgagcctgttaccagaccccttccacgagatggtagctgggaggtgaccgcctacttccggtccctccccggcgacggtgaccgagaagctcagctgtggattcctacggacgccgagctgtggatgcagcctccgcagatcacccccatcaagtcagtcagctgtgaccctctcacgatgcagctctacttggagcaccctagcgtcacggaaccgaaggagccaccggcataatgacaggagcctgagcctgtgatacactgcaatgtatataaaaaaaatattgcaaggcaactttggcacgaaccctcgagtcagtgaaacctttttttgttcagacagaggcaaggaaactacttctatcaaaaaaaaaaaaaaaa

SEQ ID NO: 9744 - protein, 205 aa, Zea mays
  misc_feature: Ceres CLONE ID no. 1555931
  misc_feature: Ceres CDNA ID no. 25447081
  misc_feature (8)..(189): Pfam Name: HORMA PFAM Desc: HORMA domain
  misc_feature: Homolog of GI Number: 50948051 NR Desc: putative mitotic arrest defective protein 2B
  misc_feature: Homolog of GI Number: 51968612 NR Desc: putative translesion synthesis polymerase zeta subunit
  misc_feature: Homolog of GI Number: 72149871 NR Desc:  similar to Mitotic spindle assembly checkpoint protein MAD2B
  misc_feature: Homolog of GI Number: 54261574 NR Desc: Mad2l2
  misc_feature: Homolog of GI Number: 56203296 NR Desc: MAD2 mitotic arrest deficient
  misc_feature: Homolog of GI Number: 15030071 NR Desc: MAD2 mitotic arrest deficient
  misc_feature: Homolog of GI Number: 61866960 NR Desc:  similar to Mitotic spindle assembly checkpoint protein MAD2B
  misc_feature: Homolog of GI Number: 55591297 NR Desc:  similar to Mitotic spindle assembly checkpoint protein MAD2B
  misc_feature: Homolog of GI Number: 6006020 NR Desc: MAD2 homolog
MDRKNQTPQGQIAQVVVEFLEVAISCIVFLKGFYPPRAFERRRYMNVVVQKALHPELTSYIHSVTFGLLPFIQKGLVERVVVIFYDKGHVPTEKFVFKLAVNQSYRSKLEEANLEFALRAFLIRLTVAEPVTRPLPRDGSWEVTAYFRSLPGDGDREAQLWIPTDAELWMQPPQITPIKSVSCDPLTMQLYLEHPSVTEPKEPPA

SEQ ID NO: 9745 - DNA, 1206 bp, Zea mays
  misc_feature: Ceres CLONE ID no. 1555937
  misc_feature: Ceres CDNA ID no. 40041464
  CDS (235)..(1020): REFERENCED BY SEQ ID NO: 9746
aactgccgtccgccgcaagccccgtcctgcactcctgcatccgttcacgttttaccccgtccggccgtccccctcgttctttctctcccccttctctctcgctgcgacgactgggtaggctgccgccgccgccctatgccaggtcctgaggaccaaggcattcgtattcgtcagtctcttcgccgggcgacgccagtttggttggaacttggagtgtagagggaagatttggtgatgagcagccgcagcccgccgccgaaggaccgcaggatgcgtactgaacgcacctcataccgtggcgcaccatatcggagggacagccgccatggtccaagcaggtttcggaatgatttgtgcaacaattgtaagcgtcctgggcattttgctagagagtgtcctagcgtggctgtctgtcatacctgcgggcttcctgggcacattgcagctgaatgttcttccaaaggtacctgctggaactgcaaagagcctggccacatggctaacagctgcccaaatgaagggatatgccgtaactgtggcaagtccggacatattgcaagagactgcactgctccaccagtgccgccaggagaagtgatcctttgcagcaactgctacaagccagggcattttcgtgaggaatgcaccaatgagaaggcctgcaacaattgccggcagagtggccatattgcccgtaactgcaccaatgatcctgtttgcaacctgtgcaatgttgctggccacctggcccgtcagtgccccaagtctgatacattgggcgagaggggtgggcctcctcccttccatggtgttggcgctcccttccgtggtgttggcgttcccttccgtggtggcctcagtgacgtgatctgccgggcctgcaaccagattggccatgcgagtcgtgactgcatggctggtgctttcatgatctgccacaactgtggcggccgtggccacacggcatatgagtgtccctctgtgagtctcattgagaggttcccacctcgccgtttctgaaggacgtccaagggctatccagatgactgttgttttcagcccattgtgtcaagaacactcatttccgttttctttttttttccaaaccctaatggattctagatctttcagattcttaacttgtcagcactatttgtgattccctaatggattctagatatttcagatcaaaaaaaaaaaaaaaaa

SEQ ID NO: 9746 - protein, 261 aa, Zea mays
  misc_feature: Ceres CLONE ID no. 1555937
  misc_feature: Ceres CDNA ID no. 40041464
  misc_feature (58)..(75): Pfam Name: zf PFAM Desc: Zinc knuckle
  misc_feature: Homolog of GI Number: 37536582 NR Desc: putative zinc finger protein
  misc_feature: Homolog of GI Number: 37220736 NR Desc: putative zinc finger protein
  misc_feature: Homolog of GI Number: 21537255 NR Desc: DNA
  misc_feature: Homolog of GI Number: 28973609 NR Desc: putative DNA
  misc_feature: Homolog of GI Number: 9369368 NR Desc: F10A5.22
  misc_feature: Homolog of GI Number: 47026923 NR Desc: ring zinc finger protein
  misc_feature: Homolog of GI Number: 1841864 NR Desc: nucleic acid binding protein
  misc_feature: Homolog of GI Number: 71747586 NR Desc: universal minicircle sequence binding protein
  misc_feature: Homolog of GI Number: 66844337 NR Desc: zinc knuckle nucleic acid binding protein
  misc_feature: Homolog of GI Number: 55663507 NR Desc:  similar to zinc finger
MSSRSPPPKDRRMRTERTSYRGAPYRRDSRHGPSRFRNDLCNNCKRPGHFARECPSVAVCHTCGLPGHIAAECSSKGTCWNCKEPGHMANSCPNEGICRNCGKSGHIARDCTAPPVPPGEVILCSNCYKPGHFREECTNEKACNNCRQSGHIARNCTNDPVCNLCNVAGHLARQCPKSDTLGERGGPPPFHGVGAPFRGVGVPFRGGLSDVICRACNQIGHASRDCMAGAFMICHNCGGRGHTAYECPSVSLIERFPPRRF

SEQ ID NO: 9747 - DNA, 793 bp, Zea mays
  misc_feature: Ceres CLONE ID no. 1556022
  misc_feature: Ceres CDNA ID no. 25446622
  CDS (192)..(593): REFERENCED BY SEQ ID NO: 9748
aattccccgccgcctcgcgcccccgctcgcttcacttctctaggtgcgcaccgatcagaaggtgcctgcctcctcctcgtcggcgaaagtatcccgctggtttccttgttcctttgctcgatgtttgctcatcgcctcatgtttgcgtgtttgctgttgtttgtcggtggtcggtgggtgacggagcagagatggcggtgccgctgctgacgaagaagatcgtgaagaagcgggtcaagcagttcaagaggccccacctcgaccgctacaagtgccttaagccaagctggcgcaggccaaagggtattgattcccgtgtcaggaggaagttcaagggatgcaccttgatgcccaacattggttatggttctgacaagtcgaccaggcactacctccccagcaagttcaagaagtttgtggtccacaacgtttctgagctggagttgctcatgatgcacaacaggacctactgcgctgaaattgctcacaacgtgtccaccaagaagcgcaaggagatcgtggagcgtgctgcacagctcgacattgtggtcaccaacaagcttgctaggctccgcagccaggaggacgagtagtctggtttcttgtcttaacgacgaactggatgttgccattcctttctgtagggaactactttgcttgtgtcttgttagtactgaaaaccagaggcactcctacctttttgcaatcagtagccactaaaatgtggcagattccactgtttaccttgcatctaaaaaaaaaaaaaaaaaaaaaaaaaaaaaaaaaaaaaaaa

SEQ ID NO: 9748 - protein, 133 aa, Zea mays; identical to SEQ ID NO: 40
  misc_feature: Ceres CLONE ID no. 1556022
  misc_feature: Ceres CDNA ID no. 25446622
  misc_feature (14)..(123): Pfam Name: Ribosomal_L32e PFAM Desc: Ribosomal protein L32
  misc_feature: Homolog of GI Number: 50947773 NR Desc: putative ribosomal protein L32
  misc_feature: Homolog of GI Number: 76057835 NR Desc: ribosomal L32
  misc_feature: Homolog of GI Number: 71534997 NR Desc: ribosomal protein L32
  misc_feature: Homolog of GI Number: 13899057 NR Desc: ribosomal protein L32
  misc_feature: Homolog of GI Number: 40287540 NR Desc: ly200 protein
  misc_feature: Homolog of GI Number: 77745481 NR Desc: ly200
  misc_feature: Homolog of GI Number: 23198054 NR Desc: ribosomal protein L32
  misc_feature: Homolog of GI Number: 21555143 NR Desc: ribosomal protein L32
  misc_feature: Homolog of GI Number: 10177580 NR Desc: ribosomal protein L32
  misc_feature: Homolog of GI Number: 31241003 NR Desc: ENSANGP00000017702

SEQ ID NO: 9749 - DNA, 1127 bp, Zea mays
  misc_feature: Ceres CLONE ID no. 1556163
  misc_feature: Ceres CDNA ID no. 40041465
  CDS (130)..(933): REFERENCED BY SEQ ID NO: 9750
aaggcaggcagcagatcgcgagttccgacttccgacgcgtctccgaccaggccgccgccatttctgtctccacacaccgggatcccccgccgctcgccgcttctccattggtccaccgtccacccaaccatgtataacaattaccggaatcctccggggacgcatatgcccccgcagaattctcaacctgtccagtttgacaatccattgtacggtgcaagctcgggtctaatccgatctgggataggagtgtatggggagaagttcttgggctctagttcagagttcatgcaaagcaacatcaatagatacttctccaacccacagtattacttccacgtgaacgatcaatatgtccggaacaagttgaaagtcatactgttcccgttctttcacagggggcactggactcgaataagcgagccggtcggtggacggttgtcctacaagcctccaatatatgacataaatgcgccggatctgtacatccctttcatggcatttggaagcttcatcattctttcagggtttacattgggtttcatgggaaagtttactccagaagctataaacctgcagtttacaagggcgctcatcggatggggcttccagctcacggtcctgaaaggcctgctctactcaatgggtggcggcgaggtgccactgctcgacctggtagcgtacggtggctatttattcgccgggctctcgctcgccgtcgtcgcgaggctcgtttgggcgtactcgtattacgtgatgatgccgtggatgagcctgtgcatgggggtgttcctggtgaggacgatgaagagggtgctcttcacggagatgaggagcagcgagaggcactcgtcgcggcagcattacttcctcctcttcatggcgatagtgcagttccccctgttcttctggctcggcagcataggcgtgtgatacacagttctgtgcgtgttatgatatttagatgtgttgtagaaaaaaaacagtcggaggatggtctcagcagcttgtgctcatccatagtatgtgttcttgatgaaccttggatgtgatgctgtatagcttgggagcaaaaaaaaaaaaaaaaaaaaaaaaaaaaaaaaaaaaaaaaaaaaaaaaaaaaaaaa

SEQ ID NO: 9750 - protein, 267 aa, Zea mays
  misc_feature: Ceres CLONE ID no. 1556163
  misc_feature: Ceres CDNA ID no. 40041465
  misc_feature (34)..(263): Pfam Name: Hrf1 PFAM Desc: Hrf1 family
  misc_feature: Homolog of GI Number: 50930107 NR Desc: OSJNBa0019G23.6
  misc_feature: Homolog of GI Number: 30695009 NR Desc: integral membrane HRF1 family protein
  misc_feature: Homolog of GI Number: 51090829 NR Desc: putative yip1 interacting factor
  misc_feature: Homolog of GI Number: 9755388 NR Desc: F17F8.24
  misc_feature: Homolog of GI Number: 33589682 NR Desc: At3g59500
  misc_feature: Homolog of GI Number: 72009661 NR Desc:  similar to Yip1 interacting factor homolog B isoform a
  misc_feature: Homolog of GI Number: 47939990 NR Desc: LOC432153 protein
  misc_feature: Homolog of GI Number: 71051180 NR Desc: LOC432153 protein
  misc_feature: Homolog of GI Number: 28277968 NR Desc: Zgc:73136 protein
  misc_feature: Homolog of GI Number: 66508222 NR Desc:  similar to CG5484
MYNNYRNPPGTHMPPQNSQPVQFDNPLYGASSGLIRSGIGVYGEKFLGSSSEFMQSNINRYFSNPQYYFHVNDQYVRNKLKVILFPFFHRGHWTRISEPVGGRLSYKPPIYDINAPDLYIPFMAFGSFIILSGFTLGFMGKFTPEAINLQFTRALIGWGFQLTVLKGLLYSMGGGEVPLLDLVAYGGYLFAGLSLAVVARLVWAYSYYVMMPWMSLCMGVFLVRTMKRVLFTEMRSSERHSSRQHYFLLFMAIVQFPLFFWLGSIGV

SEQ ID NO: 9751 - DNA, 1001 bp, Zea mays
  misc_feature: Ceres CLONE ID no. 1556477
  misc_feature: Ceres CDNA ID no. 25446553
  CDS (217)..(825): REFERENCED BY SEQ ID NO: 9752
aggaggacctgccaaacgggcctctgctccagctaaccgcctgcctgccttttcttctctcgtccaccctaggtctcagtctctgtctctgtctctgctcgcgctcttgtggagctactaggtgaccgtcgcggccgccctacgccacgtgctcgatccagcctcgtcggcttcttcgcacccgtcaccggcggtcagcacccaccaggttcatagatggcagagacggtgttcaccccctctttggaagggatgaagcatgtgaaggcggagaacggagtcattctcaccaagcccttccttgatgtctgcaagcaaatcttgcctgtcctggataaatttggagctgctatggcaattgtaaagaatgatatcagcggcaatatcacaaggctggaaaacaagtattcttcagatccatcgaagtatggacacttgtacagcatggttcaggaagaagttcaaaacaagaccgcgaaaggttcctcaagctgcacaaatggtcttctgtggctcacgagggccatggatttccttgttgagttgttccgtaacctgcttgagcatccagactggaccatgactcaagcttgcactgattcatacaccaagaccctcaagaaatttcatggctggcttgccagttctagttttacggtggccatgaagctctctcctaatagagataaatttatggaggtcattagtggaactggtgatatcaatgcagatatggagaaattttgcacaaccttctctccttttctcaaagaaaatcacgagtttctggcgagcgttggtcttgatgatatgaaggcttcgtagagcgatctccaaggtggtgattacaacaaaataagcgtgtcttatcaaactcaagtgttgcagaggatatacctgttttctgtagccatctccccattgaaaattatacagggtgataataatttttccgcatgattaaccatggctacttacacagctaaaaaaaaaaaaaaaaa

SEQ ID NO: 9752 - protein, 202 aa, Zea mays; identical to SEQ ID NO: 2090
  misc_feature: Ceres CLONE ID no. 1556477
  misc_feature: Ceres CDNA ID no. 25446553
  misc_feature: null
  misc_feature: Useful for making plants with modulated oxidative stress sensitivity
  misc_feature: Homolog of GI Number: 50910651 NR Desc: glycolipid transfer protein
  misc_feature: Homolog of GI Number: 50924476 NR Desc: OSJNBa0006B20.21
  misc_feature: Homolog of GI Number: 45773920 NR Desc: At1g21360
  misc_feature: Homolog of GI Number: 39545646 NR Desc: OJ000114_01.1
  misc_feature: Homolog of GI Number: 72037348 NR Desc:  similar to pleckstrin homology domain containing
  misc_feature: Homolog of GI Number: 45185166 NR Desc: ABL064Wp
  misc_feature: Homolog of GI Number: 55250041 NR Desc: Zgc:101886
  misc_feature: Homolog of GI Number: 50732732 NR Desc:  similar to CDNA sequence BC052360
  misc_feature: Homolog of GI Number: 30481662 NR Desc: Pleckstrin homology domain containing
  misc_feature: Homolog of GI Number: 55628370 NR Desc:  similar to phosphoinositol 4

SEQ ID NO: 9753 - DNA, 935 bp, Zea mays
  misc_feature: Ceres CLONE ID no. 1556831
  misc_feature: Ceres CDNA ID no. 25446583
  CDS (188)..(805): REFERENCED BY SEQ ID NO: 9754
aaaggccgacaaacggcgaccaggcaggcgagctcgtcgcctcgggggcagggaggaccggagcccctcgcctcggaggaagggaggacctgagttctgtttctcagctttatgatcaagcaggagctctgattaacagaatttttttgaattctccccaaattgaagggtgcacctgaagggagttatggatcggaagaatcaaactcctcaaggtcaaatagcacaggtggttgtggaatttcttgaggtagcaatcagctgcatcgtcttcctcaaaggcttctatcctcctcgtgcctttgagaggagaaggtacatgaatgtggtggtccagaaagcactgcatcctgagcttactagctatattcactctgtgactttcggtcttctacctttcattcagaagggattggtagagagggtcgtggtcatcttctatgacaaagggcatgtaccgaccgagaagttcgtcttcaagcttgcagtcaaccagtcataccgttccaagttagaggaggcgaacctggagttcgctctgcgagcattcttgatcaggctgactgttgctgagcctgttaccagaccccttccacgagatggtagctgggaggtgaccgcctacttccggtccctccccggcgacggtgaccgagaagctcagctgtggattcctacggacgccgagctgtggatgcagcctccgcagatcacccccatcaagtcagtcagctgtgaccctctcacgatgcagctctacttggagcaccctagcgtcacggaaccgaaggagccaccggcataatgacaggagcctgagcctgtgatacactgcaatgtatataaaaaaaatattgcaaggcaactttggcacgaaccctcgagtcagtgaaacctttttttgttcagacagaggcaagaaaaaaaaaaaaaaa

SEQ ID NO: 9754 - protein, 205 aa, Zea mays; identical to SEQ ID NO: 9744
  misc_feature: Ceres CLONE ID no. 1556831
  misc_feature: Ceres CDNA ID no. 25446583
  misc_feature (8)..(189): Pfam Name: HORMA PFAM Desc: HORMA domain
  misc_feature: Homolog of GI Number: 50948051 NR Desc: putative mitotic arrest defective protein 2B
  misc_feature: Homolog of GI Number: 51968612 NR Desc: putative translesion synthesis polymerase zeta subunit
  misc_feature: Homolog of GI Number: 72149871 NR Desc:  similar to Mitotic spindle assembly checkpoint protein MAD2B
  misc_feature: Homolog of GI Number: 54261574 NR Desc: Mad2l2
  misc_feature: Homolog of GI Number: 56203296 NR Desc: MAD2 mitotic arrest deficient
  misc_feature: Homolog of GI Number: 15030071 NR Desc: MAD2 mitotic arrest deficient
  misc_feature: Homolog of GI Number: 61866960 NR Desc:  similar to Mitotic spindle assembly checkpoint protein MAD2B
  misc_feature: Homolog of GI Number: 55591297 NR Desc:  similar to Mitotic spindle assembly checkpoint protein MAD2B
  misc_feature: Homolog of GI Number: 6006020 NR Desc: MAD2 homolog

SEQ ID NO: 9755 - DNA, 1220 bp, Zea mays
  misc_feature: Ceres CLONE ID no. 1556955
  misc_feature: Ceres CDNA ID no. 25402788
  CDS (343)..(981): REFERENCED BY SEQ ID NO: 9756
agttgccttcgttttgggaggacttttcttccttcgcctctacaggtttggaatcggcgctgtccgtcttcgctcttctcgccagggcaaattaaagctacaatgcaggctgcctactatgcaaaggatcttttggtttgaagtccagttgaccgaagttggaaaatacttctgatacttacagatttcacagaggtcttgtttattttctactattttccttcaagcacgtggaatagtacgtttgacaaacaatttgctgacgaggttttcgaacacggctgaacacgcgcgcaaggcgtgcacagtacacgcgcgcagggggaggaggagaacaagaggatggtgaaggcaaggcccaagccaacgccggtcaaggcggccccagaagtgatcttcgacccaatggcctctggtgcccggaagccccgccgcccaggggcgccgtcagccagcaaagaatggcacagcttcatgggatcgagtctgtcggatatgtatcggaagccagttttggagaaatctgctgacacatctgatgaggagcctgacattgatatcatgaagctgctgaaagatgttgagatcattggtgcccctacatttaaggggcgaaagcaaatcgagaaccgcagagtagttgagttgggtggaaagtccgttaagaagcaccgcacaccattaagtgttgcgaagccagctctgaagaatcagaagaaacgagaacagaagaaaatggaagaggaaaaactacttgggatctttaggaagagggacaaggacaccaaacctcacaagacaaggccagaggaccgagtgcttagggccacagaagggcgctttaggaacggtatactgaacgtcaagcatcttctggcgccaccgaaaccatcaggcaaggacatgtcggaaccgaagatgaggaaggacaagcacaaggggaagggtaagcagaaggggggcagaaggaagagacgttgaagaaagcacacttctgtaacctggtttgctattaagaatttaagatagatggttgatgaaacgtttaaatgacaacacctttttgtgtccgtcctgaaattaagacgtttccttgctctgctggaatctttgaagtgatccttgaaacgatgtaattctccaccttgaaacgaaacgatgtaattctccaggatgcggttcaggaagaggcttatttggttcaaaaaaaaaaaaaaaaa

SEQ ID NO: 9756 - protein, 212 aa, Zea mays; identical to SEQ ID NO: 4690
  misc_feature: Ceres CLONE ID no. 1556955
  misc_feature: Ceres CDNA ID no. 25402788
  misc_feature: Homolog of GI Number: 34904156 NR Desc: P0417G05.21
  misc_feature: Homolog of GI Number: 19310391 NR Desc: At2g44820/T13E15.17

SEQ ID NO: 9757 - DNA, 954 bp, Zea mays
  misc_feature: Ceres CLONE ID no. 1556968
  misc_feature: Ceres CDNA ID no. 25445935
  CDS (155)..(631): REFERENCED BY SEQ ID NO: 9758
acccccccgcactcgcatccaccacagttccgcaccgcgccgtgccgtcccgagagaacaagcgagtcagtcgtcaaagagaaggaaagcggaaggcgagccacccgccccgcccaccacctaccgcgaaggcttgaccgtggcaacatcatccatgtcctcgtcgtcgtcgtcgtcgtcgtcgatgggaggctccctcgcgctcgccgcggccacggccgtcgcgttctccggctctctcgtcatcttctcgctctgccgcgcgcacctctcccatgtccccgagccggagccggagccggagccggaggagggcgcgccggagcacgccctgcgcccctgtctcttgtcgtcagagaggcggccgcgcggggcgaaggcgaaggcgaaggcgaggagacgcaggggcgagaagcgcgtgcggttcgcgcccgacgtcgtcgacaatgagggcgccccgcgcccgaccaggtcctccgcgcccgccaccgccgctgcgtcgtcgtcgtcggcggccacctgcagggacgcggcggggtcggaggagcgtatgatgcctgccaaccgtgaggcgctctaccgcggcatgctccgggaccgctccgcgcaccgggtcacctgctcctactgacgaccctcaccgccgcccggccgcggccagcctccgcgcgccgtttcgtccgcggcgggagagctcgatcggttgattctctttgtttcgttcgccgttaggcgttagcgttcggtagccgggcggttgacttcgggaggttcatcctttcgcagacggaggattttgttaatattagaattttagtattttttcttttttttgtatatttgtgtttggctgtagattaattaatgtttttcgtttgagcgagggaggaagttctgctctgtaaatatgccgccattttatccgaagaggaaaaggcaaaaaaaaaaaaaaaa

SEQ ID NO: 9758 - protein, 158 aa, Zea mays
  misc_feature: Ceres CLONE ID no. 1556968
  misc_feature: Ceres CDNA ID no. 25445935
  misc_feature: Homolog of GI Number: 66776813 NR Desc: Phosphoribosylaminoimidazole
  misc_feature: Homolog of GI Number: 28972153 NR Desc: mKIAA0324 protein
  misc_feature: Homolog of GI Number: 5821151 NR Desc: RNA binding protein
  misc_feature: Homolog of GI Number: 67985771 NR Desc: Altronate dehydratase
  misc_feature: Homolog of GI Number: 67987177 NR Desc: 4Fe
  misc_feature: Homolog of GI Number: 6634015 NR Desc: KIAA0324 protein
  misc_feature: Homolog of GI Number: 19923466 NR Desc: splicing coactivator subunit SRm300
  misc_feature: Homolog of GI Number: 71891780 NR Desc: KIAA0324 protein
  misc_feature: Homolog of GI Number: 6649242 NR Desc: splicing coactivator subunit SRm300
  misc_feature: Homolog of GI Number: 72082973 NR Desc:  similar to Splicing factor
MSSSSSSSSSMGGSLALAAATAVAFSGSLVIFSLCRAHLSHVPEPEPEPEPEEGAPEHALRPCLLSSERRPRGAKAKAKARRRRGEKRVRFAPDVVDNEGAPRPTRSSAPATAAASSSSAATCRDAAGSEERMMPANREALYRGMLRDRSAHRVTCSY

SEQ ID NO: 9759 - DNA, 961 bp, Zea mays
  misc_feature: Ceres CLONE ID no. 1557033
  misc_feature: Ceres CDNA ID no. 25446554
  CDS (190)..(702): REFERENCED BY SEQ ID NO: 9760
aaacctccttccctcctcgcactctgtgttgcagacctccgccaccggaggttcctgcgggtgcgtttgccctgacagaacactggaggcccctgcgggtgcgctacccctgaccaagcaaccacggactagtctaccgccgtccgcagcatcgcgacgccggggtacgctccggcggtcccgtacgggatgtcgcaggtgaacatcgagggcaacgggtgcgggcgggcgctgccgccgcagccgaccgtgaaggtgtactgccgcgccaaccccaactacgccatgagcgtccgcgacgggaaggtggtgctggcgccggcgaaccccaaggacgagtaccagcactggatcaaggacatgcggtggagcacgagcatcaaggacgaggaaggttacccggcgttcgcgctggtgaacaaggcgaccggggaggccatcaagcactcgctggggcagtcccacccggtgcgcctggtgccctacaacccggactttttggacgagtcggtgctgtggacggagagccgcgacgtcggcaacggcttccgctgcgtccgcatggtcaacaacatctacctcaacttcgacgccctccacggcgacaagtggcacggcggcgtccgtgacggcaccgacgtcgtgctctggaagtggtgcgagggcgacaaccagcgctggaagatccagccctactactgaaccaacggatgatatgaccatcgcgcccatcgatcgtgcacatgcatgcatacgtactagcagaataacaggggtcttatctcccgaggcgtcttttgcatgcatgccagcagttgcatagataaagcaggagcgagacaaagggtgttcatgtatattgcagctgtatcactgtatgtatgtgccattgtgccttgtaataatacatataataataaagttgctcggagtgtattaattataaaaaaaaaaaaaaaaa

SEQ ID NO: 9760 - protein, 170 aa, Zea mays
  misc_feature: Ceres CLONE ID no. 1557033
  misc_feature: Ceres CDNA ID no. 25446554
  misc_feature (143)..(164): Pfam Name: Ricin_B_lectin PFAM Desc: Ricin
  misc_feature: Homolog of GI Number: 50940091 NR Desc: r40g3 protein
  misc_feature: Homolog of GI Number: 66277464 NR Desc: stress responsive protein
  misc_feature: Homolog of GI Number: 34902150 NR Desc: Putative r40c1 protein
  misc_feature: Homolog of GI Number: 1296955 NR Desc: osr40c1
  misc_feature: Homolog of GI Number: 50940089 NR Desc: putative r40c2 protein
  misc_feature: Homolog of GI Number: 50940087 NR Desc: r40g2 protein
  misc_feature: Homolog of GI Number: 1658313 NR Desc: osr40g2
  misc_feature: Homolog of GI Number: 50940085 NR Desc: putative r40c1 protein
  misc_feature: Homolog of GI Number: 56283929 NR Desc: CG3047
  misc_feature: Homolog of GI Number: 29250754 NR Desc: GLP_49_64409_65443
  misc_feature: Useful for making plants with increased biomass
  misc_feature: Useful for sterility
MSQVNIEGNGCGRALPPQPTVKVYCRANPNYAMSVRDGKVVLAPANPKDEYQHWIKDMRWSTSIKDEEGYPAFALVNKATGEAIKHSLGQSHPVRLVPYNPDFLDESVLWTESRDVGNGFRCVRMVNNIYLNFDALHGDKWHGGVRDGTDVVLWKWCEGDNQRWKIQPYY

SEQ ID NO: 9761 - DNA, 1594 bp, Zea mays
  misc_feature: Ceres CLONE ID no. 1557117
  misc_feature: Ceres CDNA ID no. 36699037
  CDS (36)..(1373): REFERENCED BY SEQ ID NO: 9762
aagggaatacttgaaaccccggctcccgatggatcatggatctcctctctgctgcgtacggtgctacctctgacgatgaggatgccgcggaccgacccttctccatgccggttgccaccaggtccgcctccttctctccacctcccatgaagccgccgcggtgggaatctcacccatacctccctccaacccactgcttcccgcaaccacctctgcccgacgcagcgctgccactggcatctccatccagcggcagatacatttccaagagggagcgcgctctcctggcctcatcaggggcacatattgaatccggatcatccctgcctctgacgagagtggattttgaatctgcagttggctctatcacctatccaaatctacgagctgacattttgcattctttgcgatgccaaccgaaacctggaccaagcacaagtttccctttgaggctctcagtttgtttgaagggtcacactaaagcaatcaattgtgtagattggtcaccgactcatgggcatcttcttgcttctgctggaatggatcacacggttcatgtatggaatgtatgggacaaagggaataccactgctcgtgttttgaaacatcacactgctgctgtaaaggatgtaaggtggtcacttcataggccctttttactttctggagggcttgattgttccttacagctagttgatgttgttgagggaaaagtaatggaagtattcaaggaggatcaagctgtggaggttatcaagttcaatccaagcaaccccgatctcttcctatctggtgggtccaagggttcccttaaactctgggatattcgatgtggtctggtaacaaaagaatttcagagaagccttggaaccatccttgacattgacttcagtgctgatggaagacaatttatctcttcaactgacacaaccagaagcaatattagtgagaacactataattgtttgggatgtcctgcgacaagttcctttatctaaccaggtttataccgaagcattcacatgcccgtgtgtaaggtaccacccacgtgaagcatcatttgttgcacagtccaatgggaactacattgctattttttcagcaaggccacccttcaagctgaacaagtacacgcggtttgaaggacatggagtgtggggtttccctgtgaagtgcagcttttcccttggcgggagagaactcgcatctggttcatccgatgggtccatttacttctatgattacaggtcggcaaggcttttgaggaaaatagaagccttcaaagaggcgtgcactgatgtcgcgtaccacccagtaatgcctaatgtgatcgctgcttgtagctgggctggtgaaatatctgtctttgagtgacatgattataatgctgtgtggagaagcatcagcagttcagaaccgctagcatatatatgtgtgtgtgtgtgttctgtgactcaaacaccagttaatggtcatagcagattccaaaataaaaataatttgctgtatggagttcatcgtctgaatttcagtctcagcctcgcctatgaagagattattggtggtttcaaaaaaaaagaaaaaaaaaaaaaaaa

SEQ ID NO: 9762 - protein, 445 aa, Zea mays
  misc_feature: Ceres CLONE ID no. 1557117
  misc_feature: Ceres CDNA ID no. 36699037
  misc_feature (363)..(402): Pfam Name: WD40 PFAM Desc: WD domain
  misc_feature: Homolog of GI Number: 50252728 NR Desc: putative splicing factor
  misc_feature: Homolog of GI Number: 42568531 NR Desc: WD
  misc_feature: Homolog of GI Number: 72040807 NR Desc:  similar to pre
  misc_feature: Homolog of GI Number: 34224019 NR Desc: pre
  misc_feature: Homolog of GI Number: 73964484 NR Desc:  similar to pre
  misc_feature: Homolog of GI Number: 13177730 NR Desc: MGC4645 protein
  misc_feature: Homolog of GI Number: 62651242 NR Desc:  similar to MGC4645 protein
  misc_feature: Homolog of GI Number: 30681779 NR Desc: transducin family protein / WD
  misc_feature: Homolog of GI Number: 5091552 NR Desc: T10O24.21
  misc_feature: Homolog of GI Number: 57222451 NR Desc: putative pre
MDLLSAAYGATSDDEDAADRPFSMPVATRSASFSPPPMKPPRWESHPYLPPTHCFPQPPLPDAALPLASPSSGRYISKRERALLASSGAHIESGSSLPLTRVDFESAVGSITYPNLRADILHSLRCQPKPGPSTSFPLRLSVCLKGHTKAINCVDWSPTHGHLLASAGMDHTVHVWNVWDKGNTTARVLKHHTAAVKDVRWSLHRPFLLSGGLDCSLQLVDVVEGKVMEVFKEDQAVEVIKFNPSNPDLFLSGGSKGSLKLWDIRCGLVTKEFQRSLGTILDIDFSADGRQFISSTDTTRSNISENTIIVWDVLRQVPLSNQVYTEAFTCPCVRYHPREASFVAQSNGNYIAIFSARPPFKLNKYTRFEGHGVWGFPVKCSFSLGGRELASGSSDGSIYFYDYRSARLLRKIEAFKEACTDVAYHPVMPNVIAACSWAGEISVFE

SEQ ID NO: 9763 - DNA, 1036 bp, Zea mays
  misc_feature: Ceres CLONE ID no. 1557429
  misc_feature: Ceres CDNA ID no. 35383459
  CDS (113)..(721): REFERENCED BY SEQ ID NO: 9764
aacctcttcaatcccagtcccacacaaagtttctcctcgatcctcatctcctccctctctcgagtcaagagcagagcagctaccaaacaagctctcctttcgcttccgatccatggagctcgacgccgacaacctgagcgccaccgagctccgcctcggcctgcctgggaccagcagcagcagcagcgacgactggcagaagaagccgtcgccctccgtcggggccaagcgcgctctggacgacggcaccaagagcgaggcctcggggaccagcccggccgccagagacctcgacttcgaccacgaccacgacaccgccgcgcctcccaaggcgcaagtggtcgggtggccgccggtgagggcgtacaggaagaacaccttccaggcggcggcggcggccaagaaggtcgagcagaagcagaagcagcagcagcagggaggcctgtacgtgaaggtgagcatggacggcgcgccgtacctcaggaaggtggacctccggatgtacaaggggtacagggagctcagggaggctctggacgcgctcttcaccaactccttctccgcggcggcagagggcggcggcgaccaccaccagcacgccatcgcctacgaagacaaggacggcgacctcatgctcgccggagacgtgccctgggatatgttcatctcttcgtgcaagaagctcaggataatgaagggctctgcctctgaggccaggtgatcgctgatccatacataaacagaggctacagacacgccacctgggaacgcggatccaagagcacacacggatcgtacttgacgaggaaggagggaggagcagtgtggcttgagctctccagtgttgtacaaagacatgtttctttctgaacccaaaagggagaaagatgtatgaagcgtgtatataagatcttagctagcagtttgttttcatttgtatgagcgatcgaaggctgtaaaaaatgaaaaagaaaaaagaaaagggaatgagaaattgactaaagctggtcatttttcctaaaaaaaaaaaaaaaaa

SEQ ID NO: 9764 - protein, 202 aa, Zea mays
  misc_feature: Ceres CLONE ID no. 1557429
  misc_feature: Ceres CDNA ID no. 35383459
  misc_feature: null
  misc_feature: Useful for making plants with altered terpenoid content
  misc_feature (7)..(197): Pfam Name: AUX_IAA PFAM Desc: AUX/IAA family
  misc_feature: Homolog of GI Number: 50934701 NR Desc: putative auxin
  misc_feature: Homolog of GI Number: 34897206 NR Desc: putative auxin
  misc_feature: Homolog of GI Number: 20269063 NR Desc: aux/IAA protein
  misc_feature: Homolog of GI Number: 77556998 NR Desc: AUX/IAA family
  misc_feature: Homolog of GI Number: 2224733 NR Desc: Aux22e
  misc_feature: Homolog of GI Number: 12083196 NR Desc: auxin
  misc_feature: Homolog of GI Number: 6136834 NR Desc: Aux/IAA protein
  misc_feature: Homolog of GI Number: 56783894 NR Desc: putative aux/IAA protein
  misc_feature: Homolog of GI Number: 416641 NR Desc: Auxin
  misc_feature: Homolog of GI Number: 4887012 NR Desc: Nt
  misc_feature: Useful for making ornamental plants with modified flowers
  misc_feature: Useful for making plants with increased biomass and foliage
  misc_feature: Useful for making shorter plants and plants with modified flowers
  misc_feature: Useful for making smaller plants
  misc_feature: Useful for sterility
MELDADNLSATELRLGLPGTSSSSSDDWQKKPSPSVGAKRALDDGTKSEASGTSPAARDLDFDHDHDTAAPPKAQVVGWPPVRAYRKNTFQAAAAAKKVEQKQKQQQQGGLYVKVSMDGAPYLRKVDLRMYKGYRELREALDALFTNSFSAAAEGGGDHHQHAIAYEDKDGDLMLAGDVPWDMFISSCKKLRIMKGSASEAR

SEQ ID NO: 9765 - DNA, 962 bp, Zea mays
  misc_feature: Ceres CLONE ID no. 1557517
  misc_feature: Ceres CDNA ID no. 36591795
  CDS (3)..(713): REFERENCED BY SEQ ID NO: 9766
acgcgtcagggcctcttgatcatcagtcgccagaggagctgttgatcgaggtgagtgaggttgaaaagcaggcggcgaacaaaggcaccatcgtcatggacggcggatactacggcggccgcgatcagcgctacagcggcgggtactacggcggcggtggcatcgcgacgccggggtacgctccggcggtcccgtacgggatgtcgcaggtgaacatcgagggcaacgggtgcgggcgggcgctgccgccgcagccgaccgtgaaggtgtactgccgcgccaaccccaactacgccatgagcgtccgcgacgggaaggtggtgctggcgccggcgaaccccaaggacgagtaccagcactggatcaaggacatgcggtggagcacgagcatcaaggacgaggaaggttacccggcgttcgcgctggtgaacaaggcgaccggggaggccatcaagcactcgctggggcagtcccacccggtgcgcctggtgccctacaacccggacttcctggacgagtcggtgctgtggacggagagccgcgacgtcggcaacggcttccgctgcgtccgcatggtcaacaacatctacctcaacttcgatgccctccacggcgacaagtggcacggcggcgtccgtgacggcaccaacgtcgtgctctggaagtggtgcgagggcgacaaccagcgctggaagatccagccctactactgaaccaacggatgatatgaccatcgcgcccatcgatcgtgcacatgcatgcatacgtactagcagaataacaggggtcttatctcccgaggcgtcttttgcatgcatgccagcagttgcatagataaacaggagcgagacaaagggtgttcatgtatacgttattgcagctgtatgtatgtgccttgtaataatacatataataaagttgctcggggtgtattaattagaacagaaaaaaaaaaaaaaaaa

SEQ ID NO: 9766 - protein, 205 aa, Zea mays
  misc_feature: Ceres CLONE ID no. 1557517
  misc_feature: Ceres CDNA ID no. 36591795
  misc_feature (178)..(199): Pfam Name: Ricin_B_lectin PFAM Desc: Ricin
  misc_feature: Homolog of GI Number: 50940091 NR Desc: r40g3 protein
  misc_feature: Homolog of GI Number: 66277464 NR Desc: stress responsive protein
  misc_feature: Homolog of GI Number: 34902150 NR Desc: Putative r40c1 protein
  misc_feature: Homolog of GI Number: 1296955 NR Desc: osr40c1
  misc_feature: Homolog of GI Number: 50940089 NR Desc: putative r40c2 protein
  misc_feature: Homolog of GI Number: 50940087 NR Desc: r40g2 protein
  misc_feature: Homolog of GI Number: 1658313 NR Desc: osr40g2
  misc_feature: Homolog of GI Number: 50940085 NR Desc: putative r40c1 protein
  misc_feature: Homolog of GI Number: 56283929 NR Desc: CG3047
  misc_feature: Homolog of GI Number: 6322611 NR Desc: Cell wall mannoprotein with similarity to Tir1p
MDGGYYGGRDQRYSGGYYGGGGIATPGYAPAVPYGMSQVNIEGNGCGRALPPQPTVKVYCRANPNYAMSVRDGKVVLAPANPKDEYQHWIKDMRWSTSIKDEEGYPAFALVNKATGEAIKHSLGQSHPVRLVPYNPDFLDESVLWTESRDVGNGFRCVRMVNNIYLNFDALHGDKWHGGVRDGTNVVLWKWCEGDNQRWKIQPYY

SEQ ID NO: 9767 - DNA, 941 bp, Zea mays
  misc_feature: Ceres CLONE ID no. 1557585
  misc_feature: Ceres CDNA ID no. 25446555
  CDS (336)..(752): REFERENCED BY SEQ ID NO: 9768
agaagcctctggtgcctcggccaccgcagcagcctggccctgccccggcccccgggcgtggtgtcaggtctcaggtgtggtggcgctttctcctctccggcacggtggccgcgtcatcccagctctcccgcgcggcggcggcggccgtttcctctcctgcgctcctcctgccgcacacagccagagcgcggcgtcgccgggcgtgagctcgcgagaaggacgccgagaagcaactctgaaattgcagctgaagtttgtttgaggataagcgacagctttgcgagtccttcgtgttgaaggagattgtagctgaagtgaaaaaacagcagggaacaatggcactatcacgaagtatgagagcatgtttgcacagtggaagacttgcacttcttgccatattggtctctggtggaattgtattgcaaatcttggcttgtgctctctataacaactggtggccaatgctaacagttctcatgtatcttatcctaccaatgcccctcatatttttcctgggttctgatacttcctccatgatgtccaatgggggagacggctgggtgaacttcacgaaattcttgacgggcgcatcaatagtagggagcatcgccattccgtcgatcctgaagcatgcgggcgtcattggatggggagccctgacgatggagctgtcatcctttgtggtctttggcgtggcaatcctgtggttcctccagatgaacggtgaagacgagtacagcggagtgttctaatccaaacctgctgctgctggttctcttgccagcgtggcactctgtgcatggtagttgtgaactgggctgtactgctacaacaggggaagcattgccctgggacctgatttactgacaccagtacatgtttggtctgcgatttttgtttgtcctcgtaggtttgcctgacttccaaaaaaaaaaaaaaaa

SEQ ID NO: 9768 - protein, 138 aa, Zea mays
  misc_feature: Ceres CLONE ID no. 1557585
  misc_feature: Ceres CDNA ID no. 25446555
  misc_feature (10)..(136): Pfam Name: Vps55 PFAM Desc: Vacuolar protein sorting 55
  misc_feature: Homolog of GI Number: 51090588 NR Desc: vacuolar protein sorting 55 protein
  misc_feature: Homolog of GI Number: 57900172 NR Desc: vacuolar protein sorting 55 family
  misc_feature: Homolog of GI Number: 18399269 NR Desc: vacuolar protein sorting 55 family protein / VPS55 family protein
  misc_feature: Homolog of GI Number: 34905898 NR Desc: P0458E05.25
  misc_feature: Homolog of GI Number: 45198869 NR Desc: AFR351Cp
  misc_feature: Homolog of GI Number: 62857771 NR Desc: Leprot
  misc_feature: Useful for making ornamental plants with modified leaves
MALSRSMRACLHSGRLALLAILVSGGIVLQILACALYNNWWPMLTVLMYLILPMPLIFFLGSDTSSMMSNGGDGWVNFTKFLTGASIVGSIAIPSILKHAGVIGWGALTMELSSFVVFGVAILWFLQMNGEDEYSGVF

SEQ ID NO: 9769 - DNA, 1593 bp, Zea mays
  misc_feature: Ceres CLONE ID no. 1557640
  misc_feature: Ceres CDNA ID no. 25447159
  CDS (157)..(1209): REFERENCED BY SEQ ID NO: 9770
aaagtacacagagaaacaaatacagagaggcagaggcgccatcatctcccttcttcttcacccacaagcctctaggtgcctcacaagtcctcctgtgctgtcatctcccctctcctctcctacctggtttgttcaagaaactttctttggacaaagatgggagtgcagaggtacaggttcttctgctgcgggtgtggcgccaatgcggcggccggcggccgggaacgcgacgaggacggggtgtccgacggcaaggccgagaagggggtcgaggccgggccaagggggctgtcgtgggcgcaggtggaggcgatgacgggcgggttcacctcggccgtggtcggcgagggcgggttcagcaccgtgtacctcgcgcgtctctccggcgcgctcgccgccgtcaaggtccaccgcagcagcgagcgcctccaccgcgtgttccgccaggagctcgacgcgctccagcgcgtccggcacccgcacatcgtccgcctcctagccttctgcgaccagcaagatgaaggcgtgctggtgctcgagttcgcggcgaacgggaacctgcacgagcggctccacggcgggggcaaggccgcggggacgatgccgtgggcgcggcgggtgtcggtggcgctgcaggtggcgcgcgcgctcgagcacctgcacgaccgctgcgagccgcaggtggtgcacggcgacgtgaaggcgtccaacgtgctcctggacgcgtccatgtccgccaagctgtgcgacttcgggtcggcgcggatggggttctcggccgccgtccgcccgcgctcgtccgcgcgcaccatgctgggctcgccaggctacgtcgacccgcactacatccgctccggcgtggtcaccaagaagagcgacgtgtacagcttcggggtcctgctcctggagctgctcacggggatggaggccttctgcgcggaggaaggccggctcctcacctccgtcgtcgcgccgcggctcagggcaggcgacccgccctgcgacgcgcgcgggttggtcgacgagaggctcggcaccgcctacgacgccgccgaggccgccgcggtggcggcgctggccgcggcctgtgtcggcgacaaccccagcctccggccgtccatggccgacgtggtgcgcaccctggagcagcgcgcgcagggatccatctccgccgtggagaggagatcggacggccagaggaaggtgtgagccacgagggcggggtcgtcgcgtcctccgaggcgcccagatctggcttgccgacttgttaacttgcggtgctgacgtgcgtgcgtcgcacacgtggcgcgcgaacattggttgctaggagaacaaagcgttgctggtgtgcgagcacatcaaaaggacgaatcaaaaaaaaagtggagaaaagcgtggtgaaaattgaaaagagagagagagttgattaggggaaaggtttggaggaggtaaaaaggcagggctaatctgtgtgctgatggggggtttgcatcatatgttatgtgccaaaacagcatctacttgggagagcccaaaaaatatgggtcgtgcagcacacgattctaagattttgttgaaaaaaaaaaaaaaaaa

SEQ ID NO: 9770 - protein, 350 aa, Zea mays
  misc_feature: Ceres CLONE ID no. 1557640
  misc_feature: Ceres CDNA ID no. 25447159
  misc_feature (231)..(254): Pfam Name: Pkinase_Tyr PFAM Desc: Protein tyrosine kinase
  misc_feature: Homolog of GI Number: 37536060 NR Desc: putative receptor protein kinase
  misc_feature: Homolog of GI Number: 50927073 NR Desc: OSJNBa0011L07.13
  misc_feature: Homolog of GI Number: 50911268 NR Desc: putative serine/threonine
  misc_feature: Homolog of GI Number: 50252107 NR Desc: serine/threonine
  misc_feature: Homolog of GI Number: 42571731 NR Desc: protein kinase family protein
  misc_feature: Homolog of GI Number: 42562481 NR Desc: protein kinase family protein
  misc_feature: Homolog of GI Number: 12322574 NR Desc: protein kinase
  misc_feature: Homolog of GI Number: 29367339 NR Desc: putative receptor protein kinase
  misc_feature: Homolog of GI Number: 30725492 NR Desc: At3g24600
  misc_feature: Homolog of GI Number: 53749329 NR Desc: putative serine/threonine
MGVQRYRFFCCGCGANAAAGGRERDEDGVSDGKAEKGVEAGPRGLSWAQVEAMTGGFTSAVVGEGGFSTVYLARLSGALAAVKVHRSSERLHRVFRQELDALQRVRHPHIVRLLAFCDQQDEGVLVLEFAANGNLHERLHGGGKAAGTMPWARRVSVALQVARALEHLHDRCEPQVVHGDVKASNVLLDASMSAKLCDFGSARMGFSAAVRPRSSARTMLGSPGYVDPHYIRSGVVTKKSDVYSFGVLLLELLTGMEAFCAEEGRLLTSVVAPRLRAGDPPCDARGLVDERLGTAYDAAEAAAVAALAAACVGDNPSLRPSMADVVRTLEQRAQGSISAVERRSDGQRKV

SEQ ID NO: 9771 - DNA, 1224 bp, Zea mays
  misc_feature: Ceres CLONE ID no. 1557644
  misc_feature: Ceres CDNA ID no. 25446556
  CDS (90)..(1073): REFERENCED BY SEQ ID NO: 9772
aaactcctgactcctgcactttcactctatcatcacttaccaggctactagcataacaagtcgccaatccctcctcgagagagtcagaaatggcatcacctcatagctgctttcgcggctggcagagcacgagccacgtcgcagttgcgctggtgtccgtgctgatcctgagctcggcacgtctctccgcgggcggcaggagcctgctggagctgtacaagccgccggccagcgcgctcctgacgtaccacaacggcgccgttctgcagggccgcatcccggtgtccatcatctggtacggccgcttcacgccggcgcagaaggccgtggtcaccgacttcctccggtccctcaccaccgccgccgcctcgccgccggcaccgtccccgtccgtgtcgcagtggtggagcaccatcgaccagctgtacctctccaaggcgcggggcagcggcagcggcggcagcgcgcgggtggcgctcgtcggccaggccaccgacgaagggtgctcgctggggaagcgcctgacgctggcccagctcccgcagctggcggcgcgggccgggccgaggaagggcgggatcgcgctggtgctcaccgcgcaggacgtgggcgtggacgggttctgcacgagccgctgcggcctgcacggctccgacgcccgggcccccgggaccgcgtacgtctgggtcggcaactccgccacgcagtgccccgggcagtgcgcgtggccgttccaccggcctctgtacggtccccagacgccggcgctcgtgccgacgagcggcgacgtcggcgcggacggcatggtgatcaacgtcgccagcatggtcgccggcgcggtgaccaacccgttccgcgacgggttctaccagggcgacaaggacgcgccgctggaggccgccactgcctgcacaggggtctacggcagcggcgcctaccccggtttcgcaggtaacctggcggtggaccccgcgacgggggcgagctacaatgccaatggcgcgaatgggaggaagtacctgcttccggctctgttcgaccctgcaacctctacgtgttcgactttggtgtagtaaacaatcctgtcgggattgtgtagcaacactgtgtatatagtatagtatgtggattaaggagtgtactgtgctaagtgttgataactgggtcataacacgacataaaaaaagatatgtaccttccacttttgaaaaaaaaaaaaaaaaa

SEQ ID NO: 9772 - protein, 327 aa, Zea mays
  misc_feature: Ceres CLONE ID no. 1557644
  misc_feature: Ceres CDNA ID no. 25446556
  misc_feature (51)..(327): Pfam Name: Phi_1 PFAM Desc: Phosphate
  misc_feature: Homolog of GI Number: 50912939 NR Desc: putative phi
  misc_feature: Homolog of GI Number: 51535371 NR Desc: putative phi
  misc_feature: Homolog of GI Number: 50912937 NR Desc: putative phi
  misc_feature: Homolog of GI Number: 51964396 NR Desc: PREDICTED P0627E03.37
  misc_feature: Homolog of GI Number: 50912929 NR Desc: putative phi
  misc_feature: Homolog of GI Number: 51535376 NR Desc: putative phi
  misc_feature: Homolog of GI Number: 51535378 NR Desc: putative phi
  misc_feature: Homolog of GI Number: 50912943 NR Desc: putative phi
  misc_feature: Homolog of GI Number: 3759184 NR Desc: phi
  misc_feature: Homolog of GI Number: 13194680 NR Desc: phosphate
  misc_feature: Useful for delaying flowering time
  misc_feature: Useful for increasing chlorophyll and photosynthetic capacity
  misc_feature: Useful for sterility
MASPHSCFRGWQSTSHVAVALVSVLILSSARLSAGGRSLLELYKPPASALLTYHNGAVLQGRIPVSIIWYGRFTPAQKAVVTDFLRSLTTAAASPPAPSPSVSQWWSTIDQLYLSKARGSGSGGSARVALVGQATDEGCSLGKRLTLAQLPQLAARAGPRKGGIALVLTAQDVGVDGFCTSRCGLHGSDARAPGTAYVWVGNSATQCPGQCAWPFHRPLYGPQTPALVPTSGDVGADGMVINVASMVAGAVTNPFRDGFYQGDKDAPLEAATACTGVYGSGAYPGFAGNLAVDPATGASYNANGANGRKYLLPALFDPATSTCSTLV

SEQ ID NO: 9773 - DNA, 1171 bp, Zea mays
  misc_feature: Ceres CLONE ID no. 1557690
  misc_feature: Ceres CDNA ID no. 25446557
  CDS (2)..(913): REFERENCED BY SEQ ID NO: 9774
atcttccggcgactgggcagtgagctaccgccgccgccctacgccaggtgctgaggtcttcgtcgatctcgagctcccacaagggaagctgtccaggatgggatacaaccgccacaggcgtggccggggatcatcctcatcgtcttcgcgccgcaccaagcaagaagcctcgtgtgatgatgaccttgggacatcacttccaaggcaagaaggcacagaagacgaactcaaaggttcaagaattcagcttgcaatgtgggactttggtcagtgtgatgttaaaagatgcactggtcgtaaactttcaagatttgggcttttgaaggagttgagagtgaccaatggttttggtggtgttgttctcagccctgttggaacacagtgtgtatccaaggaagatcatcctattgtgcaaagaaaaggattggctgtggttgattgttcctgggcacgtttaagtgatgtcccttttgtgaaactacgttgcggtgctcctcgtctcttaccatggttggtagcagcaaatcctgtgaactatggccgcccatgtgaactgtcatgtgtggaagctttatcagcagccctcataatatgtggggaggaagatacagcacatttgctgcttgggaaatttaaatggggtcacgcattcttgtctctaaacagagatctcctgaaagcatactcccaatgtgaaaatggagctgagattatcaatgtgcagaagtcatggttatcaagtaactcgagtgttccaaagccacctgtaaacggggcagaggaatcacggcaaaacaaggaggagggatctgaaggtgattcagacgatgacttgccccctctcgagaagaatatgaaccacctgaacctcgaagaagacgaagaaagcgaggaagagagtgaaagcgagtaaaattgtggtctgaaagtgctgccatggtaactttacgactgttttacaagtgaatttcagttgccttgcctgctacgaagcaaccgttgtaggtgcttcagtgtctaatagccagaataagcttcagtggccttttcgcccagatgttgaatgcatggttcgaaaagaaatccttgtacgcctttaatagtgtgtacctatagcactagctttgaagataaatgatgagttgaacacattgaaaaaaaaaaaaaaaaa

SEQ ID NO: 9774 - protein, 271 aa, Zea mays
  misc_feature: Ceres CLONE ID no. 1557690
  misc_feature: Ceres CDNA ID no. 25446557
  misc_feature (49)..(83): Pfam Name: RLI PFAM Desc: Possible metal
  misc_feature: Homolog of GI Number: 72384473 NR Desc: 80A08_4
  misc_feature: Homolog of GI Number: 42573329 NR Desc: RNase L inhibitor protein
  misc_feature: Homolog of GI Number: 62858567 NR Desc: LOC549889
  misc_feature: Homolog of GI Number: 72111952 NR Desc:  similar to CG4338
  misc_feature: Homolog of GI Number: 57242897 NR Desc: RIKEN cDNA 0610007P22 gene
  misc_feature: Homolog of GI Number: 24647066 NR Desc: CG4338
  misc_feature: Homolog of GI Number: 62655865 NR Desc:  similar to RIKEN cDNA 0610007P22
  misc_feature: Homolog of GI Number: 50755763 NR Desc:  similar to RIKEN cDNA 0610007P22
  misc_feature: Homolog of GI Number: 54639649 NR Desc: GA18120
  misc_feature: Homolog of GI Number: 34870557 NR Desc: similar to RIKEN cDNA 0610007P22
MGYNRHRRGRGSSSSSSRRTKQEASCDDDLGTSLPRQEGTEDELKGSRIQLAMWDFGQCDVKRCTGRKLSRFGLLKELRVTNGFGGVVLSPVGTQCVSKEDHPIVQRKGLAVVDCSWARLSDVPFVKLRCGAPRLLPWLVAANPVNYGRPCELSCVEALSAALIICGEEDTAHLLLGKFKWGHAFLSLNRDLLKAYSQCENGAEIINVQKSWLSSNSSVPKPPVNGAEESRQNKEEGSEGDSDDDLPPLEKNMNHLNLEEDEESEEESESE

SEQ ID NO: 9775 - DNA, 1388 bp, Zea mays
  misc_feature: Ceres CLONE ID no. 1557979
  misc_feature: Ceres CDNA ID no. 25446760
  CDS (168)..(1241): REFERENCED BY SEQ ID NO: 9776
aaaatcctcagatccgccccctcctccacccttgcgccgcgctttcacagctctcccgcctccggatccagatccgccgccaccaacgcctgctcctccccctcctgctgcaccaccaccatcaagaggtccagcagggcggcagcggcagcggcggcggcggcgacatggggcgtgacggcggtggcggtgtcgccggcggcatgtctgactcggtgctccggaaggtgctcctctcctacttctacgtggcggtgtggatcttcctctccttctccgtcatcgtctacaacaagtacatcctcgacccaaagatgtacaactggcccttccccatctcgctcaccatggtacacatgggtttctgctcatccctcgccgtcgcgctcgtccgcgtcctccgggtcgtcgacctccccacatcgccctccatgacgccgcagttctacacctcctccgtcgtccccatcggcgcgctctacgcgatgtcgctctggttctccaactcagcctacatctacctgtccgtgtcattcatccagatgctcaaggcgctgatgcccgtcgccgtctactccatcggcgtcctcttcaagaaggagaccttcaggtcctcctccatgctcaacatgctctctatctcattcggtgtggccatcgccgcctacggcgaggcgcgcttcgacgtgcgtggcgtcgcgctgcagctcgccgccgtcgccttcgaggccacgcggctcgtgctcatccagatcctgctcacgtccaagggcatctcgctcaaccctatcacctcgctctactatgtcgcgccgtgctgcttctgcttcctcctcgtgccctgggccttcgtcgagctgcccaggctgcgcgccgtcggtaccttccaaccggattttttcgtctttgggacgaactcactctgcgcctttgcgctcaaccttgccgtcttcctgctggtcggcaagacctcggcgctgaccatgaacgtcgcgggagtagtcaaggactggctgttgattgccttctcgtggtctgtgatccgtgacaccgtcacaccgatcaacctgttcgggtacgggatcgcgtttttaggggtgggctactacaatcatgtcaagctgcaggcgctcaaggctaaggaggcacagaagaaagccacacaggctgatgaggaggccgggtcgctcttgcaggagcgcgatggacacagtgatcgcaagagcgacaatcaggcctagagggccagatctgatcctggcttccccatattggttggttctcgatacattcatgatattgctaccattgtcacttacatgtgagagaagtgttttttgttagcttgcattgtgatataagagttcatcttaaaaaaaaaaaaaaaa

SEQ ID NO: 9776 - protein, 357 aa, Zea mays
  misc_feature: Ceres CLONE ID no. 1557979
  misc_feature: Ceres CDNA ID no. 25446760
  misc_feature: Homolog of GI Number: 34908982 NR Desc: P0003D09.29
  misc_feature: Homolog of GI Number: 18420914 NR Desc: phosphate translocator
  misc_feature: Homolog of GI Number: 61651606 NR Desc: plastidic phosphate translocator
  misc_feature: Homolog of GI Number: 15810281 NR Desc: putative phosphate/phosphoenolpyruvate translocator protein
  misc_feature: Homolog of GI Number: 15221115 NR Desc: phosphate translocator
  misc_feature: Homolog of GI Number: 50901554 NR Desc: putative phosphoenolpyruvate/phosphate translocator
  misc_feature: Homolog of GI Number: 18481711 NR Desc: putative phosphate/phosphoenolpyruvate translocator
  misc_feature: Homolog of GI Number: 13592175 NR Desc: ppg3
  misc_feature: Homolog of GI Number: 58532130 NR Desc: OSJNBa0009P12.19
  misc_feature: Homolog of GI Number: 28059199 NR Desc: integral membrane protein
MGRDGGGGVAGGMSDSVLRKVLLSYFYVAVWIFLSFSVIVYNKYILDPKMYNWPFPISLTMVHMGFCSSLAVALVRVLRVVDLPTSPSMTPQFYTSSVVPIGALYAMSLWFSNSAYIYLSVSFIQMLKALMPVAVYSIGVLFKKETFRSSSMLNMLSISFGVAIAAYGEARFDVRGVALQLAAVAFEATRLVLIQILLTSKGISLNPITSLYYVAPCCFCFLLVPWAFVELPRLRAVGTFQPDFFVFGTNSLCAFALNLAVFLLVGKTSALTMNVAGVVKDWLLIAFSWSVIRDTVTPINLFGYGIAFLGVGYYNHVKLQALKAKEAQKKATQADEEAGSLLQERDGHSDRKSDNQA

SEQ ID NO: 9777 - DNA, 987 bp, Zea mays
  misc_feature: Ceres CLONE ID no. 1558168
  misc_feature: Ceres CDNA ID no. 40352041
  CDS (65)..(718): REFERENCED BY SEQ ID NO: 9778
aacttcgtcctcagatccaaatcatgcagcggcggttattggtcatcgcgcacgcagaagatcgatggagtgcgtggtgcagggaatcatcgagaaccagcatgtcgatgctcttgaggttcttctccagggactctctggtgtcccgaaagagcgttttagggtgcatgagctctgccttaaaagtgggcccaatctaggtgttgtcccatcggaggttcgtttgttgtgtgacttagctcagcccacaccatcctggaccataagacatgttggtggtgccatgagaggtgctggtgcggagcaaatctcagttctggttcgtacagttgtggagagcaaagctagcaagaacgtcttgcactacttctacaccctagggtacaagctagaccatgaactcttgaagagcggttttgcatttcgtttccaccgaggtgcccaaatcactgtcactgttacatctgctaacaagatgtcaaggctccatgcaaccgatgaagctacgtcagtcactcctgccatacagctagtggaaatcacagctcctgctgctgctgataattacaatgatgttgtttcagctgtcactgcgttctgtgaatatcttgccccgctgctgcatctgtcaaaaccaggacactcgacaggaatcgttccaacagcagccgctgctgctgcctcactcatgtcaagtggcggtggcaaaaccttgtaatgctgctaggacagccaaagtccgttctttgagatgagtgggcgtggctaatgaggtggccttcttcgtgccgagcatttgagcagtcagttttgcctgctagtgttgtccatgtctgacacatcgttgtgccaaccttgctcttggtttgactggttgcatgattgctgatgggtaatgccctgccttgtagttgcagggtgtaacactctagtattaccaatattaaaatttctcaaaaatccaaaccataaaaaaaaaaaaaaaaa

SEQ ID NO: 9778 - protein, 217 aa, Zea mays
  misc_feature: Ceres CLONE ID no. 1558168
  misc_feature: Ceres CDNA ID no. 40352041
MECVVQGIIENQHVDALEVLLQGLSGVPKERFRVHELCLKSGPNLGVVPSEVRLLCDLAQPTPSWTIRHVGGAMRGAGAEQISVLVRTVVESKASKNVLHYFYTLGYKLDHELLKSGFAFRFHRGAQITVTVTSANKMSRLHATDEATSVTPAIQLVEITAPAAADNYNDVVSAVTAFCEYLAPLLHLSKPGHSTGIVPTAAAAAASLMSSGGGKTL

SEQ ID NO: 9779 - DNA, 1046 bp, Zea mays
  misc_feature: Ceres CLONE ID no. 1558227
  misc_feature: Ceres CDNA ID no. 36706858
  CDS (242)..(754): REFERENCED BY SEQ ID NO: 9780
aattttacctcgaaggtttcggtcttcttcctcccgcattagccgcaggtttggttgcttagcatcagggggaaacatcgcaggttgttgttttgtttgaacactatcgagaggaagaggaggaggaggaggcagagttttgggttgagagcggcagaataggtaatccgacttccggctggataagtgatccttttttttttgaatcgccagacgcggagagcggagagcaacaggtgaaatggcaattggacagggcgacgagaagaagggttcccttgccaggagcttgagctgctcaaactgcgggagcggcgcaataatttttgggcggaagagagtcgccgtctcgccgactccgggctcccggagcccgcactcgccgacgcgcaccctgcgcaagcagcgcagcgtccggttccacatggaggacgacggcgtcaacctcttcaaccagctgtcgctagatgtactggttatgatcttttgcaaggtgaaccacagtgatctgaggaacctcctcctgatatcgaaatcggtcaaagatgcgaccatcgttgctagggagcagcatttcaagttctcgacgccgccggcgaagtccggttttagagacgaggaaaccggcggcggcgacgacgacgacgagggccccggcgcgcccaagcaacacagggttgcgaggtcgcgcctgggggacacgaacctgtcgagcatcgccgtcaacctgtcggcgtcgttcgagcagatgtaaagtatatatatataatatggcgccacaggttttcagttcgcgcttctgttggcgcgcgtgtaatcagtagcttcaggttagaaggttttaagtgcctcttgtagcgcacgccatagagattaggtagtcagaaacagtatactcgtatgcgtcattactagtcctaagttaagtataatgtataaagtttttcaatgctttggttgaagaacacacgccatgtcgtcttctccgatctgtaagttatttggcatcgaagagatgtctcctctcctaaaaaaaaaaaaaaaaa

SEQ ID NO: 9780 - protein, 170 aa, Zea mays
  misc_feature: Ceres CLONE ID no. 1558227
  misc_feature: Ceres CDNA ID no. 36706858
  misc_feature: Homolog of GI Number: 28372904 NR Desc: At1g61340
  misc_feature: Homolog of GI Number: 18415709 NR Desc: F
MAIGQGDEKKGSLARSLSCSNCGSGAIIFGRKRVAVSPTPGSRSPHSPTRTLRKQRSVRFHMEDDGVNLFNQLSLDVLVMIFCKVNHSDLRNLLLISKSVKDATIVAREQHFKFSTPPAKSGFRDEETGGGDDDDEGPGAPKQHRVARSRLGDTNLSSIAVNLSASFEQM

SEQ ID NO: 9781 - DNA, 1416 bp, Zea mays
  misc_feature: Ceres CLONE ID no. 1558293
  misc_feature: Ceres CDNA ID no. 40041466
  CDS (405)..(1331): REFERENCED BY SEQ ID NO: 9782
aaccggcagagcgagagcaggccagccagggcacaaccacagcagctgcaacaactgccatgcatctgtacttggtggcgagaggcagggagctttaggcgagcctagagtcgtcgtcgtctcctctcccgatcggctggctcctacttgcatggtccccggcccgcgtctctttgctctccgatccgacctcagtcacggcgcccatcccggccgcccccttaaaaccgcaccaactcgtagccaaattctcgagctcacacccacatatatacacacagaaatatatactaccaagcttgccgcttgtcgcctcacaacctacgacgagcggctaccttaattacctagctagaattctaggggggcgcaccgcggcagcgtctagctcggagccggcggccatggcgaagccgcaggaggtgcgcagcgtcgactccttctcgcagctgccgttcatccggccggccccgcccccggctccggcgcagccgagggacgccaccatccggctcttcggctgcgacttctccaacgacgaccagcagcagcggcaggccaagcagcagcagcagcaccgccaggacgccgccgcggccgccgactcccccgacgccgccaacggcagctcgatcacgtccgagagcaacaacggagccaacaagagcggcggcggcggcggcgccgacaggaagttcgagtgccactactgctgccgcaacttcccgacgtcgcaggcgctgggcgggcaccagaacgcgcacaagcgcgagcggcagcacgccaagcgggcccacctccaggcctccctcgccatgcaccgctacgtgcccggccacatgtacggcctcttcaactaccaccagcagcaccaccaccacctcggcggcggcggcggcggccgcttcgactaccccgcgccgctgcagttgccgcccccgccgccggcgcgctacccgatgtggacgagcgccggccccgcggggccctacggcggaggcccaggctccatgtcgcagccaatcaacggtagcccggtgccggcggggctctggagggtgccgccccccgctgcgacgacgaccaccactaccgccatggagaatttcggcgtgcccggccgccggcacggcgctgctggtggcacggcggctgtcctggccgctgggccggctggcgcggaggcggcggcatgcaaggacgcgatgggcttgttgtccccctcgccctcgctctcgtcgtgctcgtccacgtcgccggagaagaagaagctaggtaggtgcgaattgggccgccagaaggagaccgttagcttggacctccatctgtaattctttctttgtttgtttgtcactatatattaggtctccgatctccttcccgttgtggatggattaacaaaaaaaaaaaaaaaaa

SEQ ID NO: 9782 - protein, 308 aa, Zea mays
  misc_feature: Ceres CLONE ID no. 1558293
  misc_feature: Ceres CDNA ID no. 40041466
  misc_feature: Homolog of GI Number: 50913293 NR Desc: putative zinc finger protein
  misc_feature: Homolog of GI Number: 50946585 NR Desc: putative zinc finger protein
  misc_feature: Homolog of GI Number: 51536147 NR Desc: zinc finger protein
  misc_feature: Homolog of GI Number: 46981882 NR Desc: putative zinc finger protein
  misc_feature: Homolog of GI Number: 18390109 NR Desc: putative zinc finger protein
  misc_feature: Homolog of GI Number: 1871188 NR Desc: putative C2H2
  misc_feature: Homolog of GI Number: 51091156 NR Desc: zinc finger protein
  misc_feature: Homolog of GI Number: 790687 NR Desc: zinc finger protein
  misc_feature: Homolog of GI Number: 32362299 NR Desc: At3g58070
  misc_feature: Homolog of GI Number: 6729550 NR Desc: zinc finger
MAKPQEVRSVDSFSQLPFIRPAPPPAPAQPRDATIRLFGCDFSNDDQQQRQAKQQQQHRQDAAAAADSPDAANGSSITSESNNGANKSGGGGGADRKFECHYCCRNFPTSQALGGHQNAHKRERQHAKRAHLQASLAMHRYVPGHMYGLFNYHQQHHHHLGGGGGGRFDYPAPLQLPPPPPARYPMWTSAGPAGPYGGGPGSMSQPINGSPVPAGLWRVPPPAATTTTTTAMENFGVPGRRHGAAGGTAAVLAAGPAGAEAAACKDAMGLLSPSPSLSSCSSTSPEKKKLGRCELGRQKETVSLDLHL

SEQ ID NO: 9783 - DNA, 970 bp, Zea mays
  misc_feature: Ceres CLONE ID no. 1558295
  misc_feature: Ceres CDNA ID no. 36707537
  CDS (201)..(590): REFERENCED BY SEQ ID NO: 9784
atgtttgcttgtacagtgctgaatgtctagttgccaattgtgtgaactgttgacagccattaaaacaagttatttggaaaaaaaaaaaaaaaaaaaaaaaaaaaaaaaaaaaaaatccatcacagctagctagcatacagacgaataatctcttcttcacctcactaacaccagctagcaactctttctctcctgcaataatggccgctcgctcctcctcctcccagccgcagctggtcgcggcggcggcggtcctggcagcggcgctgctgctgctggcggcgggggccgggacggcgtcggcggcggtgagctgcggcgaggtgacgtcgtcggtggcgccgtgcctcgggtacgcgatgggcagcgcggcgtcgccctccgcggcgtgctgcagcggggtgcgctcgctcaacagccgcgcgtcgtcggcggcggaccggcaggccacctgcaactgcctcaagagcatgacgggccggctcggcggcggcgtcagcatggccaacgccgccaacatccccggcaagtgcggcgtctccgtcggcgtgcccatcagccccaccgtcgactgcaccaagatcaactgatcgatggaaccatagtggaggtagctcgctcgttggatggcagcgtacgtggccatcagcagcatgcagtcgtcgtcgtagcagagatgtcctagctacgtgtgtgtcatgcatcagactggcacataataaagaagtagatcatgcacccactagtgatcacttcgtctagtgtccctccgttcgctgttgtcgtcgtcgtcgtcgtggtgtacctcgtacgtgacatgccgtagcacgtacgctagcagagcagcacctcaatgtccttgggtttgctttgctggctctctgttttcgtctcgtgttgcttttaatctggcacaggtttctaaattataataatgaatacttttttgtcctaaaaaaaaaaaaaaaaa

SEQ ID NO: 9784 - protein, 129 aa, Zea mays; identical to SEQ ID NO: 46
  misc_feature: Ceres CLONE ID no. 1558295
  misc_feature: Ceres CDNA ID no. 36707537
  misc_feature (39)..(125): Pfam Name: Tryp_alpha_amyl PFAM Desc: Protease inhibitor/seed storage/LTP family
  misc_feature: Homolog of GI Number: 25990344 NR Desc: lipid transfer protein
  misc_feature: Homolog of GI Number: 56713105 NR Desc: type 1 non
  misc_feature: Homolog of GI Number: 56713111 NR Desc: type 1 non
  misc_feature: Homolog of GI Number: 77548420 NR Desc: nonspecific lipid
  misc_feature: Homolog of GI Number: 1498597 NR Desc: phospholipid transfer protein
  misc_feature: Homolog of GI Number: 510337 NR Desc: lipid transfer protein
  misc_feature: Homolog of GI Number: 7438281 NR Desc: probable lipid transfer protein precursor
  misc_feature: Homolog of GI Number: 2407273 NR Desc: lipid transfer protein LPT II
  misc_feature: Homolog of GI Number: 77553487 NR Desc: nonspecific lipid
  misc_feature: Homolog of GI Number: 902058 NR Desc: lipid transfer protein precursor

SEQ ID NO: 9785 - DNA, 1264 bp, Zea mays
  misc_feature: Ceres CLONE ID no. 1558548
  misc_feature: Ceres CDNA ID no. 40352042
  CDS (2)..(925): REFERENCED BY SEQ ID NO: 9786
aaagctccatccccttgctctcaccactgaaatgagcggcggcggcggccttgggtccggctgctcgtaccagaagttcgtccacttcgcgctggagcagacccgccaccgctccactctcgtcccccacccgtcccaggaaaagttcaggttcataaaagcaaatgaggataacaccgttctcaatgccttgtcattcagcacttccaaaattagactgcttcggagcttgacaattgagcaaaaaaactcggttcaggttcttgattttgctgccttctcaagacctgaatacgaccttcctatattttgtgccaatgccttctcatcccctgcacggagtattgttgtcttggacctcaaccctttgtatgataccactgaacacaaggattacagggaaaaatactacagggctttgatgccccttgtacacaagtacagtgagcttctgccctggggtggcaagattacaagtgagtcgctgagattcttctctcccattgttatctggacggtattcgagccaagcgaagccaaccaccaagctctatactcggccttcgtggattactatatggtctggcttgagttcatggacggagcagttcgcgaaagtagcaaagaaaaaatcgaccgcaatagagaagcgcaacataaatatctcacatggagagcagagaaggatcctgggtacccgctgctaaagaagttgatcggtgagagtggtgccaaggacctggtgagggagttcctcttcgaaggagttggctcgctcggaaccaagtcgtttctggagtatttcgccgagtacgcgcaagaggacgggacggtgaacaagaagcggagcatggcggggaagtcctttggaacccgaccttgggacgcccacggactgttcgtcggcgacgctgtggatggatagcggccaagcgggggctgttttgcttctacataagcagtttcatctcaatccccgttgtttattcacggaggacttgcgtagtggtttcagttgttgtttcaagtggttttgcttcggcaaaagtactggacggttttgctggctcaggtttcagatcatctccaacctttccccatggcattccatgcgaggccggctacaatttctgttgtctctttacttcttttatagcattgttcatcatctttttcgttgtccggtgacttggctttggttgctgccgctgctcggtcggtggttttaaacttttgattcgagtcctaaaaaaaaaaaaaaaaa

SEQ ID NO: 9786 - protein, 297 aa, Zea mays
  misc_feature: Ceres CLONE ID no. 1558548
  misc_feature: Ceres CDNA ID no. 40352042
  misc_feature (16)..(244): Pfam Name: Fe_bilin_red PFAM Desc: Ferredoxin
MSGGGGLGSGCSYQKFVHFALEQTRHRSTLVPHPSQEKFRFIKANEDNTVLNALSFSTSKIRLLRSLTIEQKNSVQVLDFAAFSRPEYDLPIFCANAFSSPARSIVVLDLNPLYDTTEHKDYREKYYRALMPLVHKYSELLPWGGKITSESLRFFSPIVIWTVFEPSEANHQALYSAFVDYYMVWLEFMDGAVRESSKEKIDRNREAQHKYLTWRAEKDPGYPLLKKLIGESGAKDLVREFLFEGVGSLGTKSFLEYFAEYAQEDGTVNKKRSMAGKSFGTRPWDAHGLFVGDAVDG

SEQ ID NO: 9787 - DNA, 1503 bp, Zea mays
  misc_feature: Ceres CLONE ID no. 1558986
  misc_feature: Ceres CDNA ID no. 36706819
  CDS (142)..(1101): REFERENCED BY SEQ ID NO: 9788
agacctcgacctcccccagtcccccaccgaccaccgaccaccgacctcctttcccgcaggcacgggcgcaccggcacgcggtttccactcgcttcgtccccgttcggatcgccctcagagtaacagtctagcagagcaagcatgtcgtcgtcggcggagaacgaccccacggtgacggtgaccgagcgcggaggcaaggacaagcacgaggacggcggcgacaaggagcagggcggcggcggcttcatcgacaaggtgaaggacttcatccacgacatcggcgagaagatcgaggaggtcgtcgggttcggcaagcccacggccgacgtgtgcggcatccacatcccgcacatcagcctccaccgcgccgacctcgtcgtggacgtgctcatcaagaacccgaacccggtcccgatcccgctcgtggacatcgactacctcatcgacagcgacggccgcaagctggtgtcgggcctcatcccggacgccggcaccatccacgcgcacggccaggagaccgtcaagatcccggtgtcgctcgtcttcgacgacatcaagagcacctacaaggacatccagccgggcagcatcatcccttacctcgtccgcgtcgtgctcctcgttgacatccccatcatcggccgcgtcaagatcccgatccagaaggacggcgagatccccatcccttacaagcccgacgtcgacgtggagaagatcaagttccaccacttctccttcgaggagaccaccgccacgctccacctcaagctcgagaacaagaacgacttcgacctcggcctcaacctgctcgagtacgagatgtggctcggcgacgacagcatcgcctccgccgagctcacacagaccgccaagatcgagaagcaggggatcaccaggatgcaggtgcccttcagcttcaggcccaaggacttcggatccgctgtctgggacatgatcaggggaaggggcacgggatacaccatcaagggaaagatcgatgtcgacactcccttcggcaacatgaaactgcccataagcaaagagggtggaaccacccgcctcaagaaggaggacgacgatgacgacgacgatgacaactgaagtgaggtactactactatgtactatctgctgcctctgttgatctaatgccatactactactagtcagcactcttttcttcttcttgcaagatgtttccaattcttcattatggagtattcaccagttcagtaagtaactggtctttttgactaacgagaatgccagtggaaaagatatactgctttatcatgagcatgaatctttctagtttgattttaggtgtgttgacaggataagttcagtactgctacacgatgcaatagctgaacttggaaggcttaagttcccaaaacctgaccattttatagttgtacactctccatggatcaattataatgaaaagcttagtctactatgacctcagtagtcatagagatttttgcaaaaaaaaaaaaaaaaa

SEQ ID NO: 9788 - protein, 319 aa, Zea mays
  misc_feature: Ceres CLONE ID no. 1558986
  misc_feature: Ceres CDNA ID no. 36706819
  misc_feature: null
  misc_feature: Useful for making plants with altered alkaloid content
  misc_feature (33)..(188): Pfam Name: LEA_2 PFAM Desc: Late embryogenesis abundant protein
  misc_feature: Homolog of GI Number: 50920031 NR Desc: putative  late embryogenesis abundant protein
  misc_feature: Homolog of GI Number: 56112332 NR Desc: salt tolerance protein
  misc_feature: Homolog of GI Number: 50935741 NR Desc: late embryogenesis abundant proteins
  misc_feature: Homolog of GI Number: 3212877 NR Desc: similar to late embryogenesis abundant proteins
  misc_feature: Homolog of GI Number: 21592483 NR Desc: similar to late embryogenesis abundant proteins
  misc_feature: Homolog of GI Number: 3264769 NR Desc: late embryogenesis
  misc_feature: Homolog of GI Number: 72547023 NR Desc: proteophosphoglycan ppg4
  misc_feature: Homolog of GI Number: 72547041 NR Desc: proteophosphoglycan ppg1
  misc_feature: Homolog of GI Number: 72547036 NR Desc: proteophosphoglycan 5
MSSSAENDPTVTVTERGGKDKHEDGGDKEQGGGGFIDKVKDFIHDIGEKIEEVVGFGKPTADVCGIHIPHISLHRADLVVDVLIKNPNPVPIPLVDIDYLIDSDGRKLVSGLIPDAGTIHAHGQETVKIPVSLVFDDIKSTYKDIQPGSIIPYLVRVVLLVDIPIIGRVKIPIQKDGEIPIPYKPDVDVEKIKFHHFSFEETTATLHLKLENKNDFDLGLNLLEYEMWLGDDSIASAELTQTAKIEKQGITRMQVPFSFRPKDFGSAVWDMIRGRGTGYTIKGKIDVDTPFGNMKLPISKEGGTTRLKKEDDDDDDDDN

SEQ ID NO: 9789 - DNA, 1655 bp, Zea mays
  misc_feature: Ceres CLONE ID no. 1559089
  misc_feature: Ceres CDNA ID no. 40352043
  CDS (189)..(1208): REFERENCED BY SEQ ID NO: 9790
aaagcagaagcagaagctagtagacgagcgacgagtagctagctagctatctagagagctcatcatatcgctgctcgctctcatccaccattatattatacagaagagcagatcgagctgcaggcagaggccgagttgttgctagctagctcctgcttgctaaatttgcatcgtatccgatccattccatgaagaagtcgtcgatgatggcgcccatgacgatcatggcgagcgttgccgctgtgctcgtcctctcgtcggctagcatggcttccgccgcagatgcagctgggctggacatgaatttctacggcagcacgtgcccgcgcgtggaggccatcgtcaaggaggagatggtggcgatcctcaaggcggcgccgacgctggccggcccgctgctccgcctccatttccacgactgcttcgtcaggggctgcgacgcctccgtgctcctggactcgactcccaccagcacggcggagaaggacgccaccccgaacctcaccctccggggcttcggctccgtgcagcgcgtcaaggaccggctggagcaggcgtgcccgggcaccgtctcctgcgccgacgtcctggcgctcatggcgcgcgacgccgtcgtgctggccaacggtccctcctggcccgtcgcgctgggccgccgcgacggccgcgtctccctcgccaacgagaccaaccagctgcccccgcccaccgccaacttcacccgcctcgtcagcatgttcgccgccaagggcctctccgtcagggacctcgtcgtgctctccggcggccacaccctcggcaccgcgcactgtaacctcttcagcgaccgcctctacaacttcaccggcgccaacagcctcgccgacgtcgacccggcgctcgacgccgcctacctcgcccgcctcaggtccaggtgccggagcctcgccgacaacaccacgctcaacgagatggaccccggcagcttcctcagcttcgactccagctattacagcctggtggccaggcgccgggggctcttccactctgacgccgcgctgctcaccgacccggccaccagggcgtacgtccagcgccaggccacggggctcttcaccgccgagttcttccgcgacttcgccgactccatggtcaagatgtccaccatcgacgtgctcacaggccagcagcagggcgagatcaggaagaaatgcaacctcgtcaactgacaaataatacgtacaattaattgctgctggttttgacgatgcctttcacttaattcatccacttaattcatgcatgcatgttggttgggttcattcaattattatattcgttgcttacctttacttttgcttggttaatcttaattaaatcgtgtgagttttcttttcttttcttgagtatatatatgtatgtacgtacgtagagcgtgatgagtgtcttttcaagtttattgtttttttttactttttcctctcgtgcatatggttcaaatccattatgatgatgatgtaatgcatataattaataatgacaatcaagtcaataaacacacatgcaatttatatatgatatgttcatcataaaaaaaaaaaaaaaaaaaaaaaaaaaaaaaaaaaaaaaaaaaaaaaaaaaaaaaaaaaaaaaaaaaaaaaaaaaaaaaaaaaaaa

SEQ ID NO: 9790 - protein, 339 aa, Zea mays
  misc_feature: Ceres CLONE ID no. 1559089
  misc_feature: Ceres CDNA ID no. 40352043
  misc_feature (52)..(300): Pfam Name: peroxidase PFAM Desc: Peroxidase
MKKSSMMAPMTIMASVAAVLVLSSASMASAADAAGLDMNFYGSTCPRVEAIVKEEMVAILKAAPTLAGPLLRLHFHDCFVRGCDASVLLDSTPTSTAEKDATPNLTLRGFGSVQRVKDRLEQACPGTVSCADVLALMARDAVVLANGPSWPVALGRRDGRVSLANETNQLPPPTANFTRLVSMFAAKGLSVRDLVVLSGGHTLGTAHCNLFSDRLYNFTGANSLADVDPALDAAYLARLRSRCRSLADNTTLNEMDPGSFLSFDSSYYSLVARRRGLFHSDAALLTDPATRAYVQRQATGLFTAEFFRDFADSMVKMSTIDVLTGQQQGEIRKKCNLVN

SEQ ID NO: 9791 - DNA, 928 bp, Zea mays
  misc_feature: Ceres CLONE ID no. 1559091
  misc_feature: Ceres CDNA ID no. 40352044
  CDS (68)..(562): REFERENCED BY SEQ ID NO: 9792
aaccccggcagcgaccagccagtgatcgaccgaggcagagactgactaggagcagagagcagcggagatggtgaagattccgagccccaggaggctgttcaggagccggtccaggagcaccaccatcatcggcggcggcggcgcggacatctgcgccatggtcgccgagcacgagaggatcgagtgggaggtgcggcccggcgggatgctggtgcagaagcggcgctcgacggaggacgacgcggcggcggccgtggagtacatcctggtgagagtctccaccaccgggtggcagtggcacgacgtctccatcgacgccaccgcaaccttcggcgacctgaaggtgatgctgtcgctggcgaccgggctgtggcccagggagcagaggctgctgtacaggggcaaggagagggacgactgcgagcacctgcacatggtgggggtccaggacaaggataaggtgctgctcctggaggacccggccgtcaaggagaggaagctcaggtcaaccaccttggcgcagctcatgggcgtgccctgccactccttcatccaagtgtagagaggcagagagaggaatttcttgccattttttctcctgtctcgtcgtcgtcgttctccagtttaatttgcctgcgtgagcgaaggtttccgtccagtctaaccgcgtttgttcagagcctgctgggttccatctcagggcttgaattcggccaatcgaatcaagacagtcgcaaacgataggatataaagatgatggatacatggcgtaaattactgtgaacgggtacgtaatgtcatcccagtgccagtgtgtgtgagccagtagttctttggttccttgctctgtatatattctctcttttttttcttccaaaaaaaaaaaaaaaaaaaaaaaaaatggtgcttctaaaaaaaaaaaaaaaaa

SEQ ID NO: 9792 - protein, 164 aa, Zea mays
  misc_feature: Ceres CLONE ID no. 1559091
  misc_feature: Ceres CDNA ID no. 40352044
MVKIPSPRRLFRSRSRSTTIIGGGGADICAMVAEHERIEWEVRPGGMLVQKRRSTEDDAAAAVEYILVRVSTTGWQWHDVSIDATATFGDLKVMLSLATGLWPREQRLLYRGKERDDCEHLHMVGVQDKDKVLLLEDPAVKERKLRSTTLAQLMGVPCHSFIQV

SEQ ID NO: 9793 - DNA, 1021 bp, Zea mays
  misc_feature: Ceres CLONE ID no. 1559201
  misc_feature: Ceres CDNA ID no. 25401392
  CDS (105)..(653): REFERENCED BY SEQ ID NO: 9794
aactccactccacttccagcgtgccttgctcgttgctcctcactcagtcacctcccctgcctctgcacgtactacgtacgtgccgaggacacagcgggcggagaatgggaggcgtaggcggcgcgccgcggcggccgggcgaggtgacggagctggagctgcgcatccagctgcctgacggcggcggctacaacatcaacgacaacgccgacatcctggccgagatcctggcgcgcctggacgggcgctcgctggccgcggccgcctgcgtgtgccgcctgtgggccgccgtggcgcgccgcgacgccgtctgggaggcgctgtgcctccgccacgtcggccccgcgccgccggcggcggccgcgggcccggccacccgcgccgtcgtcgccgcgctcggcgggtaccgccgcctctaccgcctgtgcctcggcccggcgctcgaccggctggcgcaggcgcaggcccaggcggcgcgggcgcaccacctgtcgctctccctctccctctcgctcttctccatcgactgctacgagcgcctcggcggcggcgggggagcggcggggcccagcgccggcgcgggtgcgcgcgggagacagcagcagcagccgtcgtcgctgctgttcctctgcaagcccgtcgacgtgtcgtgatggcattcagcttcagccgtcgtccttcctccgcgagcccgtacgtcgacgtgtcgcgatggcattcagctctcgtcgctcgctcctctgctcgtcctttccatgtcgtcgcgtcgtccttggcgtacgctgtctgccctgggcgcctggcctttgctgctgctagctgcaacctgcaatgctcgtttgcgtgtctcacggccgccgccgccgcttaacataatcgttttaattggtttggttttgttgattagcacggacgaacaacaggcaagtaagagctcttcaatcaattcaagctgtacccggagaggcttattaaattctaataatgcttattctttcttcaagaaaaaaaaaaaaaaaaa

SEQ ID NO: 9794 - protein, 182 aa, Zea mays
  misc_feature: Ceres CLONE ID no. 1559201
  misc_feature: Ceres CDNA ID no. 25401392
  misc_feature (20)..(75): Pfam Name: F PFAM Desc: F
  misc_feature: Homolog of GI Number: 66776813 NR Desc: Phosphoribosylaminoimidazole
  misc_feature: Homolog of GI Number: 66779737 NR Desc: Secretion protein HlyD
  misc_feature: Homolog of GI Number: 66778899 NR Desc: UvrD/REP helicase
  misc_feature: Homolog of GI Number: 33411641 NR Desc: GID2
  misc_feature: Homolog of GI Number: 67984758 NR Desc: Carbohydrate kinase
  misc_feature: Homolog of GI Number: 29247944 NR Desc: GLP_26_54603_52153
  misc_feature: Homolog of GI Number: 66778264 NR Desc: LigA
  misc_feature: Homolog of GI Number: 66779656 NR Desc: Insulinase
  misc_feature: Homolog of GI Number: 55243222 NR Desc: ENSANGP00000027512
MGGVGGAPRRPGEVTELELRIQLPDGGGYNINDNADILAEILARLDGRSLAAAACVCRLWAAVARRDAVWEALCLRHVGPAPPAAAAGPATRAVVAALGGYRRLYRLCLGPALDRLAQAQAQAARAHHLSLSLSLSLFSIDCYERLGGGGGAAGPSAGAGARGRQQQQPSSLLFLCKPVDVS

SEQ ID NO: 9795 - DNA, 1293 bp, Zea mays
  misc_feature: Ceres CLONE ID no. 1559225
  misc_feature: Ceres CDNA ID no. 40041467
  CDS (141)..(1094): REFERENCED BY SEQ ID NO: 9796
agttccattccgattccaacgcaccattcttttttatcgctttcggccagcctctcggtcgaacgaaaaaactgcccacggctagctgccacgcgctttctcggagagatcgacaagctgcaccctcatatcattcatcgatggcgagccttgggctggtcctgcttgtcgccgtcgtcgtgtccgcggcgctcatgccaccgtccgccgtcgcgcagcagctgacgccggactactacgccagcacctgccccaacctcgaggccatcgtccggcgctccgtccagcagtccatggcgcagtcccagatcgccgcgcccgccgcgctcaggctcttcttccacgactgcgccgtcatgggctgcgacgcgtcgatcatgatcgtgaactcgaacggcgacgacgagtggcggaacaccgccaaccagtcgctcaagccggaagggttccaggccattctcagcgccaaggccgccgtggacagcaaccagcagtgccagtacaaggtgtcgtgcgcggacatcatggccctcgtcgccagagaagccgtcttcctgagtggcgggccgtactaccaggtggagctcggccggttcgacggcagggtgtcgactagggacagcgtccggctgccgagtgtcaacttcaccctggaccagctcaacgccttcttctccggcctcggcttctcccagaacgaaatggtcgccctcttaggcgcgcacaccctcggcgcggcggactgccctttcttccagtacaggatcggcgacccgagcatggacccgagcctcgcgtcccagctgcgcggcacctgcggctccaaccccagcggtggcttcgcgttcttcgacccctcgccggtgaggttcgacaacgccttctaccggaacctgcaaggaggcagggggctcctgggcaccgaccaggtgctgtacagcgaccagagatcacgcagcgcggtcgactcctacgcgtccaaccagggcgccttcttcaccgacttcgtggcggcgatcaccaagctcgggaggatcggggccaagacggcggctactggtgagatacgccgcgtctgcaacttcccaaactagcgagcgagtatctgagcttagtttattggcaacgactgctatgcatgcaagcagtccttctttataagcatgcaagcaaactatctgttccattagattacgatccaaccacagatataacatttattagaggagttttttataaagattattgagctggtggtgaaaaaaaaaaaaaaaagaaaaaaaaaaaaaaaaa

SEQ ID NO: 9796 - protein, 317 aa, Zea mays
  misc_feature: Ceres CLONE ID no. 1559225
  misc_feature: Ceres CDNA ID no. 40041467
  misc_feature (44)..(281): Pfam Name: peroxidase PFAM Desc: Peroxidase
  misc_feature: Homolog of GI Number: 53792855 NR Desc: putative peroxidase ATP8a
  misc_feature: Homolog of GI Number: 55701049 NR Desc: TPA: class III peroxidase 91 precursor
  misc_feature: Homolog of GI Number: 55701051 NR Desc: TPA: class III peroxidase 92 precursor
  misc_feature: Homolog of GI Number: 55701053 NR Desc: TPA: class III peroxidase 93 precursor
  misc_feature: Homolog of GI Number: 53792852 NR Desc: putative peroxidase
  misc_feature: Homolog of GI Number: 971564 NR Desc: peroxidase2
  misc_feature: Homolog of GI Number: 55701047 NR Desc: TPA: class III peroxidase 90 precursor
  misc_feature: Homolog of GI Number: 13992528 NR Desc: peroxidase2
  misc_feature: Homolog of GI Number: 4138647 NR Desc: peroxidase
  misc_feature: Homolog of GI Number: 50929299 NR Desc: OSJNBa0071I13.13
  misc_feature: Useful for making ornamental plants with modified flowers
MASLGLVLLVAVVVSAALMPPSAVAQQLTPDYYASTCPNLEAIVRRSVQQSMAQSQIAAPAALRLFFHDCAVMGCDASIMIVNSNGDDEWRNTANQSLKPEGFQAILSAKAAVDSNQQCQYKVSCADIMALVAREAVFLSGGPYYQVELGRFDGRVSTRDSVRLPSVNFTLDQLNAFFSGLGFSQNEMVALLGAHTLGAADCPFFQYRIGDPSMDPSLASQLRGTCGSNPSGGFAFFDPSPVRFDNAFYRNLQGGRGLLGTDQVLYSDQRSRSAVDSYASNQGAFFTDFVAAITKLGRIGAKTAATGEIRRVCNFPN

SEQ ID NO: 9797 - DNA, 1202 bp, Zea mays
  misc_feature: Ceres CLONE ID no. 1559257
  misc_feature: Ceres CDNA ID no. 25446558
  CDS (127)..(969): REFERENCED BY SEQ ID NO: 9798
agtcgtcgtcgtcgcatcgcacgcaccatcgtcctgccgatcgatcgcagccagccagtcttgctgagagacgaactgaagcctgaagtgaaccgatcgatcgatcgatcgagcgagcgagctcccatgaaggcgttgattctggcggcggtgctgctgctgcagcacgggggagccgcgagcgccggcggcaacttctaccaggacgtggacatcacctggggcgacggccgcggcaagatcctcgacaacggccagctcctgacgctgtccatggacaggtcctccggctcgggcttccagtccaaggcccagtacctctacggccgcttcgacatgcagctcaagctcgtcccgggggactccgccggcaccgtcgccaccttctatctttcgtcgcagggttcgcagcacgacgagatcgacttcgagttcctggggaacgcgagcggggagccgtacacggtgcacacgaacgtgtacagccaggggaagggcgggcgggagcagcagttccggatgtggttcgaccccacggcggccttccacgcctactccgtgctgtggaaccccgcccacgtcgtcttctacgtggacggcgtccccatccgggagttccggcgccgcggcgacgggaccgtgccgttcccgacgtcgcagccgatgcgggtgtacgccagcgtgtgggacgcggaggagtgggccacgcagggggggcgcgtccggaccgactggtccaaggcgcccttcgtcgcgtcgtaccgcgggtacgccgccgccgggtgcaccgcgccggacgccgccgcctgcgcgcgctccaacggcgcatggatgtcgcaggagctcgacagcgccggccaggagcagctccgccgggcgcaggccagctacatgatctacaactactgcaccgataagtaccggttcccgcagggcccgccgcccgagtgctcgtcgccggccaagtagtagatgagtagaattgatcggatacagagagcaatcaattaattaaatcgacccgtcgcttggtttttggtttacacattgtactacggcataagttcggcggatatatgtatacgtagacggctagacgccatgcatgtgtcttggcatgtatcgtattcgtatatatcgtaattcgtatgtacctcagtatacctgcatcgtacatttacatgcaaaaaaaaaaaaaaaaa

SEQ ID NO: 9798 - protein, 280 aa, Zea mays
  misc_feature: Ceres CLONE ID no. 1559257
  misc_feature: Ceres CDNA ID no. 25446558
  misc_feature: null
  misc_feature: Useful for making plants with altered cell wall content and/or composition
  misc_feature (228)..(275): Pfam Name: XET_C PFAM Desc: Xyloglucan endo
  misc_feature (24)..(205): Pfam Name: Glyco_hydro_16 PFAM Desc: Glycosyl hydrolases family 16
  misc_feature: Homolog of GI Number: 563235 NR Desc: xyloglucan endo
  misc_feature: Homolog of GI Number: 53793224 NR Desc: putative xyloglucan endotransglycosylase
  misc_feature: Homolog of GI Number: 68532877 NR Desc: xyloglucan endotransglucosylase/hydrolase
  misc_feature: Homolog of GI Number: 29691676 NR Desc: putative xyloglucan endotransglycosylase
  misc_feature: Homolog of GI Number: 8886865 NR Desc: xyloglucan endotransglycosylase XET1
  misc_feature: Homolog of GI Number: 8886867 NR Desc: xyloglucan endotransglycosylase XET2
  misc_feature: Homolog of GI Number: 29500899 NR Desc: putative xyloglucan endotransglycosylase
  misc_feature: Homolog of GI Number: 22947852 NR Desc: xyloglucan endotransglycosylase
  misc_feature: Homolog of GI Number: 4539299 NR Desc: xyloglucan endo
  misc_feature: Homolog of GI Number: 19911573 NR Desc: syringolide
MKALILAAVLLLQHGGAASAGGNFYQDVDITWGDGRGKILDNGQLLTLSMDRSSGSGFQSKAQYLYGRFDMQLKLVPGDSAGTVATFYLSSQGSQHDEIDFEFLGNASGEPYTVHTNVYSQGKGGREQQFRMWFDPTAAFHAYSVLWNPAHVVFYVDGVPIREFRRRGDGTVPFPTSQPMRVYASVWDAEEWATQGGRVRTDWSKAPFVASYRGYAAAGCTAPDAAACARSNGAWMSQELDSAGQEQLRRAQASYMIYNYCTDKYRFPQGPPPECSSPAK

SEQ ID NO: 9799 - DNA, 1173 bp, Zea mays
  misc_feature: Ceres CLONE ID no. 1559345
  misc_feature: Ceres CDNA ID no. 36690984
  CDS (1)..(888): REFERENCED BY SEQ ID NO: 9800
aacactcctctcatgcccaatccacgcgcaggaatggaacttggcgccaccactgccctgtaccctctgcaccgctgcaaaaccatttacctggtcaggcatgcccagggcattcacaacgtcgcaggcgagaaggacttcggcgcctacatgtcacatgaactgttcgatgctcagctcacccctttgggttggaaccaagtcgatggtctgcgggagcatgtgaagaaaagtgggcttgcagagaagattgaattggttattacttcccctttactgaggactatgcaaactgcagttggggtctttggtggtgaaaagtatactgatggtgtaaatgcacctccactaatggttgaaaatgctggacacagtggacgtccagctgtttcaagtttgaactgccccccatttattgcagttgaaacctgcagagagcacttgggtgtccatccatgtgacaagaggaggagcataacagaataccggcctctcttccctgccattgatttttcattgatagagaatgatggagatgttctttgggaaccagatgtgagagaaacaaatgaggctgtcgcattgaggggtatgaagtttatggactggttgtggacaagagaagagaaagagatagctattgtcagtcacagtggtttcttgtttcacaccttaagcatgtacagcaaggagtgccatccaaccataagagacgaagttagcaagcactttgcaaactgcgagctacggtcgatggtgttggttgacagaagcatgcttgggtcatattcgtcaagattcaactatgctggcaagaatccaaccgggctagatgtgcctagtgatattgcagataagaagcaggttgatgaagctcagaagaactgaggcaaccttgaaagcataccgtagatgacttggattatcaaaaagccactctgacctttgcgaagcttgcttgcttgctttgaagagggcatctactacagatagagtttacacataccattgcgttagtcgagatgaactacgcagcaatgtataagcatgtctgctcttttgtctcagcctacatttgagattcagggcattggactaagatcgcctatttatgataataataataataataaccggatcaccccacattcaccagaaaaaaaaaaaaaaaaa

SEQ ID NO: 9800 - protein, 284 aa, Zea mays
  misc_feature: Ceres CLONE ID no. 1559345
  misc_feature: Ceres CDNA ID no. 36690984
  misc_feature (17)..(213): Pfam Name: PGAM PFAM Desc: Phosphoglycerate mutase family
  misc_feature: Homolog of GI Number: 50921189 NR Desc: OSJNBa0068L06.8
  misc_feature: Homolog of GI Number: 21700765 NR Desc: phosphoglycerate mutase
  misc_feature: Homolog of GI Number: 21700767 NR Desc: phosphoglycerate mutase
MELGATTALYPLHRCKTIYLVRHAQGIHNVAGEKDFGAYMSHELFDAQLTPLGWNQVDGLREHVKKSGLAEKIELVITSPLLRTMQTAVGVFGGEKYTDGVNAPPLMVENAGHSGRPAVSSLNCPPFIAVETCREHLGVHPCDKRRSITEYRPLFPAIDFSLIENDGDVLWEPDVRETNEAVALRGMKFMDWLWTREEKEIAIVSHSGFLFHTLSMYSKECHPTIRDEVSKHFANCELRSMVLVDRSMLGSYSSRFNYAGKNPTGLDVPSDIADKKQVDEAQKN

SEQ ID NO: 9801 - DNA, 1282 bp, Zea mays
  misc_feature: Ceres CLONE ID no. 1559413
  misc_feature: Ceres CDNA ID no. 25446762
  CDS (78)..(950): REFERENCED BY SEQ ID NO: 9802
agccccatcccccaccacccagtcagtgtctgtcaccgcctcaccgaccacacgccaagggaagaagcagcagcgccatggccgcgccgctcacggccgtccgggcccgcctcctcctcctcccagtgacctgcacggcagccggtaccaccggccggccggcccctccgtccaagagcagcaggccgcgtctactaccaccaggcaccacccggtgccggtgctccaggcctcccatggaggcggtggcgccggtgtccgcggcggcggtggcggcgctgctgctgctgccggcggacgcggcgctggcggtgggcggcgagttggggatcctcgagggccgcagcttcgcgctgctgcacccgctcatcatgggcgggctcttcgcgtacacgctctgggcggggtacctcggctggcagtggcgccgggtgcgcaccgtccaggacgagatcaacgcgctcaagaagcagctcaagcccgccgccaccgcggccactcccgccgcggtcggcgccggcgccggcgcggactcctccaccaccccgccgcccgctgcggccagcaagtcgccgtcgccggcggaggtccggatcgaggagctcaccgaggagcggaaggcgctgctcaaggggtcgttccgggaccgccacttcaacgcgggctccctcctcctcggcctcggcgtcctcgagtccgtcggcggcgcgctcaacacctggttccgcaccggcaagctgttcccgggcccgcacctcttcgcgggcgccgccatcaccgtgctgtgggccgccgcggccgcgctcgtcccggcgatgcagaagggggacgagacggcccgcagcctgcacatcgcgctcaacgccgtcaacgtcctgctcttcgtctggcagatccccaccgggctcgagatcgtcggcaaggtcttcgagttcaccacctggccatgacccatgagacgacgtccttccttgtgcgcgctggcatccttcctgcatgtcccttcacccttctcttctctttcgtcccatcccatgacccatgtattgcttggtagtgttaggttcaatctccgtctgcaggtcgttgttttcttgacctgtcgaagtcgatccatgttcacaaagctgtgatgctgagaatgccaaatcacaagttcctttacactgtacgcgacaagagagttcgttctgcagtacacggtctttagttaagccgaatccccaaaatttatgcaaccccgaatactatatcaagttgaagagcaaaaaaaaaaaaaaaa

SEQ ID NO: 9802 - protein, 290 aa, Zea mays
  misc_feature: Ceres CLONE ID no. 1559413
  misc_feature: Ceres CDNA ID no. 25446762
  misc_feature: Homolog of GI Number: 23130190 NR Desc: COG1114: Branched
  misc_feature: Homolog of GI Number: 66777231 NR Desc: Ferric
  misc_feature: Homolog of GI Number: 72547041 NR Desc: proteophosphoglycan ppg1
  misc_feature: Homolog of GI Number: 11359723 NR Desc: proteophosphoglycan
  misc_feature: Homolog of GI Number: 13592175 NR Desc: ppg3
  misc_feature: Homolog of GI Number: 72547023 NR Desc: proteophosphoglycan ppg4
  misc_feature: Homolog of GI Number: 72547036 NR Desc: proteophosphoglycan 5
  misc_feature: Homolog of GI Number: 5821145 NR Desc: RNA binding protein
  misc_feature: Homolog of GI Number: 47124032 NR Desc: SRRM2 protein
MAAPLTAVRARLLLLPVTCTAAGTTGRPAPPSKSSRPRLLPPGTTRCRCSRPPMEAVAPVSAAAVAALLLLPADAALAVGGELGILEGRSFALLHPLIMGGLFAYTLWAGYLGWQWRRVRTVQDEINALKKQLKPAATAATPAAVGAGAGADSSTTPPPAAASKSPSPAEVRIEELTEERKALLKGSFRDRHFNAGSLLLGLGVLESVGGALNTWFRTGKLFPGPHLFAGAAITVLWAAAAALVPAMQKGDETARSLHIALNAVNVLLFVWQIPTGLEIVGKVFEFTTWP

SEQ ID NO: 9803 - DNA, 1364 bp, Zea mays
  misc_feature: Ceres CLONE ID no. 1559496
  misc_feature: Ceres CDNA ID no. 40041468
  CDS (46)..(1065): REFERENCED BY SEQ ID NO: 9804
aactgacacccgtggcatccctctcgtgactcccggagcggaggcatggacaccgcggcggagctggagctggggctggagttggagcagaagccggcggcggggtactggagcgtggtgggcgcgcgcccttgcgacgcgtgcgccgcggagccggcgcggctgcactgccgcgcggacggcgcgttcctgtgccccggctgcgacgcccgggcgcacggcgccgggtcgcgccacgcgcgcgtctggctgtgcgaggtctgcgagcacgcccccgccgtcgtcacctgccgcgccgacgccgccgcgctctgcgccgcctgcgacgccgacatccactcggccaacccgctcgcgcgccgccacgagcgcctccccatcgcccctctcttcggcgcgctcgcggacgcgccgcagcccttcccgtccccggccctcgctgccgccgcgggggccgaggccccggccccgaccccggctcagggtgaagcggtggcggaagactacgggagcagcgaggccgaggcggcgtcgtggttgctccccgagcccgacaacagccacgaggacagcgccgccgacacgttcttcgcggagtcggacgcgtacctcggcgccgacctcgacttcgcccggtgcatggacggcgtcaaggccatcggcgtgccggtcgcgccgcccgagctggacatcggtgccggcagcttttgctaccccgaacactccatgaaccacattttgtcgtcatcctcggaggtggcggtggtaccggacgcgcaggcggccggtctgccggtggtggtggtggtgagcagaggggaggagcgggaggcgcggctgatgcggtaccgtgagaagcgcaagaaccgccggttcgacaagaccatccgctacgcgtcccgcaaggcgtacgccgagacgcggccgcgcatcaagggccgcttcgccaagcgccgttccgcggagggcgaggacgaggcgctggagcacgaggaaggggcgtgcttctcgcccgcggggtcggcgcccgccgcgtcggacggcgtcgtcccgtccttgtgttgaggggagaagacgacgacgaccccggcagacggctgcttaactttgccagctctgtcgaccctgaaccttttttttttccctcccccaccttctctcttttgatcgaggggttgccagctctggatctgaaactctgaacgcatgggacgcgagctgtgtgtagcatgaataactgcgtagtttgttggatggacgaactcaatcgcgctcgcatggaatggaactcttgtaatccaccctttgtacattaccatctagagttgctccttttttccatgagccaaaaaaaaaaaaaaaaa

SEQ ID NO: 9804 - protein, 339 aa, Zea mays
  misc_feature: Ceres CLONE ID no. 1559496
  misc_feature: Ceres CDNA ID no. 40041468
  misc_feature (267)..(305): Pfam Name: CCT PFAM Desc: CCT motif
  misc_feature (27)..(69): Pfam Name: zf PFAM Desc: B
  misc_feature: Homolog of GI Number: 51964156 NR Desc: PREDICTED OJ1476_F05.18 gene product
  misc_feature: Homolog of GI Number: 21655154 NR Desc: CONSTANS
  misc_feature: Homolog of GI Number: 21667487 NR Desc: CONSTANS
  misc_feature: Homolog of GI Number: 50925989 NR Desc: OSJNBa0067K08.19
  misc_feature: Homolog of GI Number: 4091806 NR Desc: CONSTANS
  misc_feature: Homolog of GI Number: 41323978 NR Desc: CONSTANS
  misc_feature: Homolog of GI Number: 21281083 NR Desc: putative CONSTANS B
  misc_feature: Homolog of GI Number: 21594050 NR Desc: CONSTANS
  misc_feature: Homolog of GI Number: 41323976 NR Desc: CONSTANS
  misc_feature: Homolog of GI Number: 9759262 NR Desc: CONSTANS
  misc_feature: Useful for making ornamental plants with modified leaves
  misc_feature: Useful for making plants with increased biomass and foliage
  misc_feature: Useful for making shorter plants
  misc_feature: Useful for making stronger plants
MDTAAELELGLELEQKPAAGYWSVVGARPCDACAAEPARLHCRADGAFLCPGCDARAHGAGSRHARVWLCEVCEHAPAVVTCRADAAALCAACDADIHSANPLARRHERLPIAPLFGALADAPQPFPSPALAAAAGAEAPAPTPAQGEAVAEDYGSSEAEAASWLLPEPDNSHEDSAADTFFAESDAYLGADLDFARCMDGVKAIGVPVAPPELDIGAGSFCYPEHSMNHILSSSSEVAVVPDAQAAGLPVVVVVSRGEEREARLMRYREKRKNRRFDKTIRYASRKAYAETRPRIKGRFAKRRSAEGEDEALEHEEGACFSPAGSAPAASDGVVPSLC

SEQ ID NO: 9805 - DNA, 896 bp, Zea mays
  misc_feature: Ceres CLONE ID no. 1559499
  misc_feature: Ceres CDNA ID no. 25446559
  CDS (71)..(493): REFERENCED BY SEQ ID NO: 9806
aatggctatgcttgaaaatgaaccaatggaatactagtaggcatgccccatctgtgctacaagggtcggaatggacttgataggacatttgactatgcaacatggaagttatttcaagatgcaacgcaggcgcagagtccgaaaagtatcttctgggtcccattctttattatctttgttgagaaaggacttgagaaatggcagtttgcagtcatttctcggtggatcatcctatgtatccaatcctcctgctgcagcaccagatccatttgtgtcatctttaatttgtactttgcctgtggctgaaccatccaaagatttacattccgactcatctgacaataactttttgctaaataaattcccagatgaaaagcctgtagagagggctgaaccatcattgtcggagaaagatcagaaggaaagggttcaaaggagcaaattcgtccgagggcttgtgctctcgacaatatttgatgatgataacttgtaaagggggtcatcaaacttgataacagcatcacaatagttaaggaacacgaagagaatcatcagactctgctgctgttgtcgtgatcacacaagaggcccatctaagttcgtatatgtacggatggaatatttatgcatgtatgtatttatgtttatctccctgcatttacccttagtgcaacagggtggtaggggacggttgtagtattccaaatttatgtatcaaataaatgaggacactgtccttggggtgcaattgtgtatataatataataatagggagctactcgccatgatttaggatattttatttaactgttgtaataatatgcagtgttttgtatgatgaccccatttttttatatataactgttcattttagtcaagaaaaaaaaaaaaaaaaa

SEQ ID NO: 9806 - protein, 140 aa, Zea mays
  misc_feature: Ceres CLONE ID no. 1559499
  misc_feature: Ceres CDNA ID no. 25446559
  misc_feature (1)..(134): Pfam Name: Di19 PFAM Desc: Drought induced 19 protein
  misc_feature: Homolog of GI Number: 25992529 NR Desc: fiber protein Fb2
  misc_feature: Homolog of GI Number: 66271049 NR Desc: Fb2
  misc_feature: Homolog of GI Number: 22137252 NR Desc: AT3g06760/F3E22_10
  misc_feature: Homolog of GI Number: 469110 NR Desc: Di19
  misc_feature: Homolog of GI Number: 45752696 NR Desc: At5g26990
  misc_feature: Homolog of GI Number: 22137138 NR Desc: AT5g49230/K21P3_11
  misc_feature: Homolog of GI Number: 10177152 NR Desc: drought
  misc_feature: Homolog of GI Number: 50907317 NR Desc: putative fiber protein Fb2
  misc_feature: Homolog of GI Number: 56201905 NR Desc: fiber protein Fb2
  misc_feature: Homolog of GI Number: 26452996 NR Desc: putative drought
MDLIGHLTMQHGSYFKMQRRRRVRKVSSGSHSLLSLLRKDLRNGSLQSFLGGSSYVSNPPAAAPDPFVSSLICTLPVAEPSKDLHSDSSDNNFLLNKFPDEKPVERAEPSLSEKDQKERVQRSKFVRGLVLSTIFDDDNL

SEQ ID NO: 9807 - DNA, 1524 bp, Zea mays
  misc_feature: Ceres CLONE ID no. 1559533
  misc_feature: Ceres CDNA ID no. 25446763
  CDS (89)..(976): REFERENCED BY SEQ ID NO: 9808
atttcaagctctcctcccctcttcctaccattagcagtagctacagccagaacaccagcagacagcagcatcagcagggaggaacacgatgagcggcgccggtccggatctgcagctgccaccggggttccggttccacccgacggacgaggagctggtgatgcactacctctgccgccgctgcgccggcctgcccatcgccgtccccatcatcgccgagatcgacctctacaagttcgacccatggcagctcccaaggatggcgctgtacggcgagaaggagtggtacttcttctccccgcgggaccgcaagtacccgaacgggtccaggcccaaccgcgccgccggggctgggtactggaaggccaccggcgctgacaagcccgtgggcacgcccaagccgctggccatcaagaaggcgctcgtcttctacgccggcaaggcgcccaagggcgagaagaccaactggatcatgcacgagtaccgcctcgccgacgtcgaccgctcggcgcgcaagaagaacagcctcaggttggatgactgggtcctgtgccgcatctacaacaagaagggcggcgggctggagaaggcggcggcgccggcggccggcggcgaccacaagcctgtgttcgccacggcggcggtgagctccccgccggagcagaagccgttcgtggcggcggcgggcgggctgcccccggcgttcccggagctggcggcgtactacgaccggccgtcggactcgatgccgcggctgcacgcggactactccagctgctcggagcaggtgctgtccccggagcagctggcgtgcgaccgggaggtgcagagccagcccaagatcagcgagtgggagcggaccttcgcctccgaccccgtgaaccccgcgggctccatgctcgaccccgtcgtcggccacgccggcggcgacccgctgctgcaggacatcctcatgtactggggcaagccgttctagacgacaccgcccatcatgtcctgaggggaggtgggggtggcgaagcatcctcggctgcggttggttggttgattgatctgtcttgggcagcgcaatgcaatgcaaccgcacggtgtgggctttgactcaggcgagccgccattgttgacttgcaaggaggatataatatgaaactatagctggattacatggagaggcggcaatgagaccgtctggccccgccggaagggagacggagacggagacggatggcgcagtgcatcgggtgtggtggatcgtgcgcggcatgtgtgtgtgtggctgtacatatacatactgtacatgattggttcagtgcagggtttctgttccttcattgattagttattatactaataagtactagtaattttgtaagggcttgtagttgcagtctccgtactggtggtaggtagtgcaggccatattcgtcatcgccaagcttcgagtgtacttactcctacaatatactagtatagtgcccgtgcgttgcaacggcgtacaattatttaataaaaaaaaaaaaaaaa

SEQ ID NO: 9808 - protein, 295 aa, Zea mays
  misc_feature: Ceres CLONE ID no. 1559533
  misc_feature: Ceres CDNA ID no. 25446763
  misc_feature: Useful for making plants with modulated growth and phenotype characteristics
  misc_feature: The sequence is a functional homolog of  SEQ ID NO 102 in the  10/374,780 US patent application
  misc_feature: The sequence is a functional homolog of  SEQ ID NO 2012 in the  10/374,780 US patent application
  misc_feature: The sequence is a functional homolog of  SEQ ID NO 312 in the  10/412,699 US patent application
  misc_feature: The sequence is a functional homolog of  SEQ ID NO 731 in the  11/479,226 US patent application
  misc_feature: The sequence is a functional homolog of  SEQ ID NO 853 in the  10/374,780 US patent application
  misc_feature: The sequence is a functional homolog of  SEQ ID NO 886 in the  10/225,066 US patent application
  misc_feature: The sequence is a functional homolog of  SEQ ID NO 890 in the  10/374,780 US patent application
  misc_feature: The sequence is a functional homolog of  SEQ ID NO 891 in the  10/374,780 US patent application
  misc_feature (10)..(135): Pfam Name: NAM PFAM Desc: No apical meristem
  misc_feature: Homolog of GI Number: 58013003 NR Desc: NAC23
  misc_feature: Homolog of GI Number: 50902220 NR Desc: OsNAC6 protein
  misc_feature: Homolog of GI Number: 50931421 NR Desc: putative no apical meristem
  misc_feature: Homolog of GI Number: 62546185 NR Desc: NAC2 protein
  misc_feature: Homolog of GI Number: 21105748 NR Desc: nam
  misc_feature: Homolog of GI Number: 31322576 NR Desc: NAC
  misc_feature: Homolog of GI Number: 31322578 NR Desc: NAC
  misc_feature: Homolog of GI Number: 8671840 NR Desc: Strong similarity to OsNAC6 protein from Oryza sativa gbAB028185. ESTs gbAI996805
  misc_feature: Homolog of GI Number: 82568708 NR Desc: NAC family protein
  misc_feature: Homolog of GI Number: 40647397 NR Desc: NAC domain protein
MSGAGPDLQLPPGFRFHPTDEELVMHYLCRRCAGLPIAVPIIAEIDLYKFDPWQLPRMALYGEKEWYFFSPRDRKYPNGSRPNRAAGAGYWKATGADKPVGTPKPLAIKKALVFYAGKAPKGEKTNWIMHEYRLADVDRSARKKNSLRLDDWVLCRIYNKKGGGLEKAAAPAAGGDHKPVFATAAVSSPPEQKPFVAAAGGLPPAFPELAAYYDRPSDSMPRLHADYSSCSEQVLSPEQLACDREVQSQPKISEWERTFASDPVNPAGSMLDPVVGHAGGDPLLQDILMYWGKPF

SEQ ID NO: 9809 - DNA, 932 bp, Zea mays
  misc_feature: Ceres CLONE ID no. 1559616
  misc_feature: Ceres CDNA ID no. 25445917
  CDS (206)..(769): REFERENCED BY SEQ ID NO: 9810
agccttccttcctgttggttgcttctttctactcgcgctcgcaccaaccagaggagcaaccgagcagtagcgactcctctgcgtgaggcctgccgtcatcccccgtgggccgtggccgtggccgtgcgcaaaaaaacaaaccatcctcgattcgaccggaggggaaggagacgcgccgggagaagggggaagagacgcggcgaccatgtctccgatctgggtgttcgggtacggctcgctgatctggaacccaggcttcgcctacgacgaccgcgtcgtcggctttgtcagggactaccgccgcgtcttctaccaagggagcacggaccacaggggcacgccgcagttccccgggaggaccgtcacgctcgagcaccagcccggagcgacttgctggggagttgcttacagaataaaggaggaagataaggagatagctttggagtatcttgaggtcagggagaagcaatatgatgagaaggtttaccttgacttgtatactgattcatcgcccaaagtaccagctgtcgaaaatgtgatggtatacttcgccaccagtaacaaggagaacaatcaaaactatcttggtcctgcacctctggaagaaatgaccaggcaaatttaccttgctcaaggcccatctggacctaacaaagagtatgtgttcaaactcgaggacgcgttacacaaattaggagttgtagaccaacatgtccaagaactggcaaatgctctgcgtgagtattctgacaccgagttatctaagtgaaagatcacatttaccccttgtttggagggtaaggatttataaataaagttagaattcattcatgcatgtcccaacatggatatattcttgtaagctgcgttttgagtgactacattacgattatattcctgtgcacatgtggtttgcaaaaaaaaaaaaaaaa

SEQ ID NO: 9810 - protein, 187 aa, Zea mays
  misc_feature: Ceres CLONE ID no. 1559616
  misc_feature: Ceres CDNA ID no. 25445917
  misc_feature (4)..(180): Pfam Name: ChaC PFAM Desc: ChaC
  misc_feature: Homolog of GI Number: 50900454 NR Desc: OSJNBa0064H22.12
  misc_feature: Homolog of GI Number: 76573349 NR Desc: meloidogyne
  misc_feature: Homolog of GI Number: 82623379 NR Desc: ChaC
  misc_feature: Homolog of GI Number: 8655989 NR Desc: Contains similarity to cation transport protein CHAC from Escherichia coli gi2506988.
  misc_feature: Homolog of GI Number: 30102602 NR Desc: At4g31290
  misc_feature: Homolog of GI Number: 27525010 NR Desc: putative cation transporter
  misc_feature: Homolog of GI Number: 50908085 NR Desc: putative OsCTTP
  misc_feature: Homolog of GI Number: 73970152 NR Desc:  similar to CG2540
  misc_feature: Homolog of GI Number: 62645612 NR Desc:  similar to RIKEN cDNA 1810008K03
  misc_feature: Useful for increasing chlorophyll and photosynthetic capacity
  misc_feature: Useful for making plants with increased biomass and foliage
  misc_feature: Useful for making shorter plants
  misc_feature: Useful for sterility
MSPIWVFGYGSLIWNPGFAYDDRVVGFVRDYRRVFYQGSTDHRGTPQFPGRTVTLEHQPGATCWGVAYRIKEEDKEIALEYLEVREKQYDEKVYLDLYTDSSPKVPAVENVMVYFATSNKENNQNYLGPAPLEEMTRQIYLAQGPSGPNKEYVFKLEDALHKLGVVDQHVQELANALREYSDTELSK

SEQ ID NO: 9811 - DNA, 1206 bp, Zea mays
  misc_feature: Ceres CLONE ID no. 1559651
  misc_feature: Ceres CDNA ID no. 29191211
  CDS (107)..(1000): REFERENCED BY SEQ ID NO: 9812
aaagttttgatgctttgtgccagttattagagctttcaggacccatcttatccctgttatcgttccaacttcaggttgccttgtctgatctgcaggtgcgcatggtatggccggcctgatcagcttgcgcgccggtccgaggagttcaccgtcacttgcccggtcgtcgtccgcctgggcatcaccatcaccggcttcacaggtggcggttcgtttgccaagcccactgtttcgctgtgccaaacttcgtaggagccgtagtctactggcagcagcactggagatctctaaggacggttccgccgcggttctggccaacagcctgccttcccaaggggctatcgagacgctgcggaatgccgatgcagtatgtttcgacgttgacagcaccgtcatcctggacgagggcattgacgagcttgctgatttctgcggggcggggaaagctgttgctgaatggactgcaaaggccatgacagggactgttccgtttgaggaggcgctggcagccaggctgtctttaatcaagccatctctctcccaggtggaggagtgcctggagaagaggccaccaaggatttctcctggaatggctgatttggttaataagctaaaatccaataatattgacgtgttccttgtgtcaggaggcttccgacaaatgatcaagccagtagcatttgagcttggtattcctcctgaaaacatcactgcaaaccaattgttatttggcacattgggggagtacgccggatttgatcccacagagcccacttctcgcagtgggggtaaagcaaaagcagtgcagcaaataaaacaggaccatggctacaagacagttgttatgattggtgatggtgcaactgatctggaggcccggcaacctggcggagcagacttgttcatatgttacgccggggttcagatgagagagccagtcgcagcacaagctgactgggtggtttttgattttcaagagctgatcactaagttgccatgaattcattacctaccgcaatttatgaacctttgcattgtcggctaaataattgcggccacattttaaagctgtagatttcactagcaattcttggagacaactgaattattacccggttgtaaagtattttttatttgttttcccgcattgtttgtatgatcctgaaccatgaatgcggaggttgtgttcaaaaaaaaaaaaaaaaa

SEQ ID NO: 9812 - protein, 297 aa, Zea mays
  misc_feature: Ceres CLONE ID no. 1559651
  misc_feature: Ceres CDNA ID no. 29191211
  misc_feature (85)..(271): Pfam Name: Hydrolase PFAM Desc: haloacid dehalogenase
  misc_feature: Homolog of GI Number: 77552147 NR Desc: phosphoserine phosphatase SerB
  misc_feature: Homolog of GI Number: 77555844 NR Desc: phosphoserine phosphatase SerB
  misc_feature: Homolog of GI Number: 62900892 NR Desc: Phosphoserine phosphatase
  misc_feature: Homolog of GI Number: 3759179 NR Desc: 3
  misc_feature: Homolog of GI Number: 50758156 NR Desc:  similar to phosphoserine phosphatase
  misc_feature: Homolog of GI Number: 61859070 NR Desc:  similar to phosphoserine phosphatase
  misc_feature: Homolog of GI Number: 76653256 NR Desc:  similar to phosphoserine phosphatase isoform 1
  misc_feature: Homolog of GI Number: 62900749 NR Desc: Phosphoserine phosphatase
  misc_feature: Homolog of GI Number: 49898873 NR Desc: Psph
  misc_feature: Homolog of GI Number: 57087505 NR Desc:  similar to phosphoserine phosphatase
MAGLISLRAGPRSSPSLARSSSAWASPSPASQVAVRLPSPLFRCAKLRRSRSLLAAALEISKDGSAAVLANSLPSQGAIETLRNADAVCFDVDSTVILDEGIDELADFCGAGKAVAEWTAKAMTGTVPFEEALAARLSLIKPSLSQVEECLEKRPPRISPGMADLVNKLKSNNIDVFLVSGGFRQMIKPVAFELGIPPENITANQLLFGTLGEYAGFDPTEPTSRSGGKAKAVQQIKQDHGYKTVVMIGDGATDLEARQPGGADLFICYAGVQMREPVAAQADWVVFDFQELITKLP

SEQ ID NO: 9813 - DNA, 1112 bp, Zea mays
  misc_feature: Ceres CLONE ID no. 1559657
  misc_feature: Ceres CDNA ID no. 25446560
  CDS (82)..(825): REFERENCED BY SEQ ID NO: 9814
acccctagaaaaaaacgtgctcgatctccctccgccactccatccatctcctcgctcccagtccccgggaagctacgaagcatggcgtccgtcaccgcccgcgccccggtcgcggcccttcgcccgtcgtcggcatcgctcaagtcgtcgtcggccttccttggccactctagccgcctcggccgcaccgcgtcgcccacgaggcgcagcctcaaggcggaggccaagggcgagtggctccccggccttccctccccctcctacctcgacggcagcctggcgggtgacaatggcttcgacccgttgggcctggcggaggaccccgagaacctgcggtggttcgtgcaggcggagctggtgaacggccggtgggccatgcttggcgtggccgggatgctcatcccggaggtgctgaccaaagccgggctgatcaacgcgccgcagtggtacgacgccggcaagtcggagtacttcgcgtcgtcgtccacgctgttcgtggtcgagttcatcctgttccactacgtggagatccggcggtggcaggacatcaagaaccccggcagcgtcaaccaggaccccatcttcaagagctacagcctgccgccgcacgagtgcggctacccgggcagcgtcttcaacccgctcaacttcgcgcccacgctcgaggccaaggagaaggagctcgccaacgggaggctggcgatgctggcgttcctgggcttcctgatccagcacaacgtcaccggcaaggggcccttcgacaacctgctgcagcacctgtctgacccatggcacaacaccatcatccagaccttctccggttgagtcgaggtcgaggagggatacgatccatcgctggtgagctgatatggactggaaggcaaacattgaaaccttaaattcctttctggatcagtttgtgtgtgttaatctatctggagggtacagattcgggccgtgttgcaatgcatgcatggtctgaagggagcgagggctgaggagtgactggtatgtacattagctgaaggggaggttaagggtagagatcgtttgatcagtatcatctgtatatccccatgcatggggtttcgtttgaaaaaaaaaaaaaaaaa

SEQ ID NO: 9814 - protein, 247 aa, Zea mays
  misc_feature: Ceres CLONE ID no. 1559657
  misc_feature: Ceres CDNA ID no. 25446560
  misc_feature (57)..(219): Pfam Name: Chloroa_b PFAM Desc: Chlorophyll A
  misc_feature: Homolog of GI Number: 50946089 NR Desc: putative chlorophyll a/b
  misc_feature: Homolog of GI Number: 72580631 NR Desc: chlorophyll a/b binding protein presusor
  misc_feature: Homolog of GI Number: 3789952 NR Desc: chlorophyll a/b
  misc_feature: Homolog of GI Number: 9624495 NR Desc: chlorophyll a/b
  misc_feature: Homolog of GI Number: 100197 NR Desc: chlorophyll a/b
  misc_feature: Homolog of GI Number: 100196 NR Desc: chlorophyll a/b
  misc_feature: Homolog of GI Number: 13385204 NR Desc: cDNA sequence BC002118
  misc_feature: Homolog of GI Number: 22753 NR Desc: Lhca4 protein
  misc_feature: Homolog of GI Number: 829287 NR Desc: Lhca4 protein
  misc_feature: Homolog of GI Number: 23197770 NR Desc: chlorophyll A
MASVTARAPVAALRPSSASLKSSSAFLGHSSRLGRTASPTRRSLKAEAKGEWLPGLPSPSYLDGSLAGDNGFDPLGLAEDPENLRWFVQAELVNGRWAMLGVAGMLIPEVLTKAGLINAPQWYDAGKSEYFASSSTLFVVEFILFHYVEIRRWQDIKNPGSVNQDPIFKSYSLPPHECGYPGSVFNPLNFAPTLEAKEKELANGRLAMLAFLGFLIQHNVTGKGPFDNLLQHLSDPWHNTIIQTFSG

SEQ ID NO: 9815 - DNA, 1016 bp, Zea mays
  misc_feature: Ceres CLONE ID no. 1559883
  misc_feature: Ceres CDNA ID no. 25446630
  CDS (145)..(768): REFERENCED BY SEQ ID NO: 9816
aatcaaccccaaccccaacgactccaactccaagtcaaagagagcagcaagagcacgtgccggccgccgatcaaatccaccgagcaatcgcgcgcggccgccgaggtgccaaggcggcggcggtcggtcggtctgcgatatacgatggcggcgccttactacggaggtcctccggcggcgccggcccccgtggcggtggtgtccccgcagttctgtgcgccgtacgtggtgcccctgacggtgaccaagaaggccatcagcctctccgacggcgacttcaccgtcaccgacgccaacggcgccaccgtgctgcaggtcaagggcgccgtcttcagtatccgccaccgccgcgtcctcctcgacgccgccggccagcccatcctcaccatgctggagaaggtattcagcatgcacaacagatgggaggtgttcagaggggacagctcgaacgagagcgacctgctcttcaccgcgaagaaatcctcgatattccagctgaagacggagatggacatcttcctggcctccaacaccgcgcagcaggtgtgcgacttcaagatcaagggcagctacttcgagaggtcgtgcgccttctacctcggcaactccagcagcatgatcgcccagatgaaccgccagtttaccgtcaccaatgtgctgcttggaagggacacgtttggcgtcactgtgttcccgcacgttgactacgtgttcgtcgctgctcttgttgtgatactggatgagattcatagggaacggtccgactgaggaacataccacaccacaccaccaagcttctccaccgttgctcgaccatgctatgctatgtatcatcatcacaggttattcttgtcaattatatactttccatgtatgtatatgtaagtattaatgagttaatacactatctcctgatctatatgttttatatatgtgtctaagtttttcttcatccatttgaatatagacataaaattcaaatgactattattttgggatgaaaaaaaaaaaaaaaa

SEQ ID NO: 9816 - protein, 207 aa, Zea mays
  misc_feature: Ceres CLONE ID no. 1559883
  misc_feature: Ceres CDNA ID no. 25446630
  misc_feature: Homolog of GI Number: 71042553 NR Desc: Chain A
  misc_feature: Homolog of GI Number: 66844999 NR Desc: DUF567 domain protein
  misc_feature: Homolog of GI Number: 7248459 NR Desc: arabinogalactan protein
  misc_feature: Homolog of GI Number: 55665385 NR Desc: serine\/arginine repetitive matrix 1
  misc_feature: Homolog of GI Number: 61826057 NR Desc:  similar to serine\/arginine repetitive matrix 1
  misc_feature: Homolog of GI Number: 33150824 NR Desc: Ser/Arg
  misc_feature: Homolog of GI Number: 55586489 NR Desc:  similar to Ser/Arg
  misc_feature: Homolog of GI Number: 23274133 NR Desc: Serine/arginine repetitive matrix 1
MAAPYYGGPPAAPAPVAVVSPQFCAPYVVPLTVTKKAISLSDGDFTVTDANGATVLQVKGAVFSIRHRRVLLDAAGQPILTMLEKVFSMHNRWEVFRGDSSNESDLLFTAKKSSIFQLKTEMDIFLASNTAQQVCDFKIKGSYFERSCAFYLGNSSSMIAQMNRQFTVTNVLLGRDTFGVTVFPHVDYVFVAALVVILDEIHRERSD

SEQ ID NO: 9817 - DNA, 1060 bp, Zea mays
  misc_feature: Ceres CLONE ID no. 1560036
  misc_feature: Ceres CDNA ID no. 25446764
  CDS (141)..(803): REFERENCED BY SEQ ID NO: 9818
aaaacaacgcaacgcatcgcatcacagccagctatagccaggctccttgttttccaaattaaagccttttttcttaatttccctagctccaagtcgagtgtgtgtgatcgagagagctagctagcagatcgagcgcgcgcatgatggcgacgacgacgaggagtaggccgatgctgctcgccttggccgcggtggtggcgacgctgctggtggtggccgcgccggcgccggcgtccgggcagcccggccccggcggcgtcgttgggggcgccatgtcgtgcacggcgtcgctggtcaccagcttcacgccgtgcctcaacttcatcaccaacggcagcgcctccccgaccgacgactgctgccggtcgctgggggcgctgatgagggccagcaccggctgcgcgtgcctcatcctcaccggcagcgtctccgtcggcgtgcccgtcaaccggacgctcgccgtccggctgcccagggcgtgcaactccacctctctccagctgcagtgccgagacgcgtcctcagctcagagcccagctccaggccccgtcgcagatgcgcctgcgccctctctgtccacggccccgttgccaccaccagcgacggcggcggcagcgccggagcctgacgaagcaccggcgccggccacgcccacggccgcggcgccggtcagccaggggcagacgaggccgacggttgtgcccggcgcctcctcctcctcctcctcgacagcaagctcggacgcgccagcgacggctgggtttgtactgttgcttgcaattggagctgcgctcatgacctgatgcgatggttcgctaaataacgtcggagcactggagtgtcttggtgaatcttattagctgctatttaattattagtatctgtttgttactaaatcgatggtgttctgaactggcagtgcctgctgtattttaccacatttttttgtcacggtgtttgaacctttcatcagtttcgtcgtcaggacttagcagaataatgtactgtgtactgttatggtggaatatatttttttattgtctaaaaaaaaaaaaaaaaa

SEQ ID NO: 9818 - protein, 219 aa, Zea mays
  misc_feature: Ceres CLONE ID no. 1560036
  misc_feature: Ceres CDNA ID no. 25446764
  misc_feature (46)..(122): Pfam Name: Tryp_alpha_amyl PFAM Desc: Protease inhibitor/seed storage/LTP family
  misc_feature: Homolog of GI Number: 42571345 NR Desc: protease inhibitor/seed storage/lipid transfer protein
  misc_feature: Homolog of GI Number: 50934537 NR Desc: protease inhibitor
  misc_feature: Homolog of GI Number: 50924828 NR Desc: OSJNBa0072F16.17
  misc_feature: Homolog of GI Number: 8778716 NR Desc: T25N20.10
  misc_feature: Homolog of GI Number: 12018147 NR Desc: vegetative cell wall protein gp1
  misc_feature: Homolog of GI Number: 47087423 NR Desc: serine/arginine repetitive matrix 1
  misc_feature: Homolog of GI Number: 51963322 NR Desc: PREDICTED P0417F02.20 gene product
  misc_feature: Homolog of GI Number: 50926032 NR Desc: OSJNBa0067K08.24
MATTTRSRPMLLALAAVVATLLVVAAPAPASGQPGPGGVVGGAMSCTASLVTSFTPCLNFITNGSASPTDDCCRSLGALMRASTGCACLILTGSVSVGVPVNRTLAVRLPRACNSTSLQLQCRDASSAQSPAPGPVADAPAPSLSTAPLPPPATAAAAPEPDEAPAPATPTAAAPVSQGQTRPTVVPGASSSSSSTASSDAPATAGFVLLLAIGAALMT

SEQ ID NO: 9819 - DNA, 1478 bp, Zea mays
  misc_feature: Ceres CLONE ID no. 1560172
  misc_feature: Ceres CDNA ID no. 25402754
  CDS (87)..(1043): REFERENCED BY SEQ ID NO: 9820
aacgcgcctgcccacgtacgcctcctcccctcccacacccaaccccagcgcacccacaagaggaataggaggaatcaatccgccccatgcccacatccgtcgccacccacgcatccctcctcctcaaagccgcagccgccaagccttgcttctcagcccgcgcggcggcccggatccccgccccttctcaccgtcctcgcccgcccgctggccgtcgcctgccgaccacggcggccgctctcgccgccgcagcccgccggttccggtggccttcggcggccgcgtcggcgcgggggctgtgcgccgcgccgcatttcggcggagaggggatgggatctgatgcgggggcggggggcaggaagaggcgggtgccagcggtgaacgggctcgccaaggacgcgcctgcggtgaacgggatgcgcaaggaggagcccgtggccgcgcctcccaggttgctcacgctgcccactgtgctcaccattggccgcgtcgctgctgtgcctcttctgatcagcactttctacatggagggtccatgggcagctatggccacaacaggcatcttccttgctgccgcagtcactgattggctagatggttatattgctagaaagatgcagctaggaacaccttttggtgcatttcttgatcctgtggccgacaagcttatggtagcggcaacattagttttgctatgcaccaaacctttggaatcatcactgctcaatgatgggccatggcttctaacagtcccttccattgccatcattggaagagagattacaatgtcagctgtgagagagtgggctgcatctcagaatagcaaagttcttgaggctgttgcagttaacaacttagggaagtggaagacagcgacgcagatgacagcattgactctgcttctcgcaagcagagacccaagtctacctgcgcaaggcgctctagttgcccccggtgttgctctactttacgtctccacgggactcgccgtatggtccctagtggtgtacatgagaaagatatggcgtatactgctaaaatagtattagcacaatatatatatagtgtaatagaagaaacaagcaaggcgagcatccgttcgtgatcgtacaacttttggaaggctgtttagttgattgggtggcctgagccctagagctggttgggatcctcattcctctgtaacttgtgcgtcagtttttggtggatttgccgctaaatttgctgaggcatgccaggatcctattagatttttagaaacaagacatggtgtgaccctccgtgcgtaatgagaattcttagaaacaagaagacatggtgtgaccctgcgtgcgtaatgagatataagtctgcggacgcagaagattgtaaccttatacaaacacaacctggaggtttctgcgtgtggagttctaccgttgtactctacacataatatcataatataccaggagcgtacagaaaaaaaaaaaaaaaaa

SEQ ID NO: 9820 - protein, 208 aa, Zea mays
  misc_feature: Ceres CLONE ID no. 1560172
  misc_feature: Ceres CDNA ID no. 25402754
  misc_feature (47)..(201): Pfam Name: CDP PFAM Desc: CDP
  misc_feature: Homolog of GI Number: 50948983 NR Desc: putative phosphatidylglycerolphosphate synthase
  misc_feature: Homolog of GI Number: 51970280 NR Desc: putative CDP
  misc_feature: Homolog of GI Number: 3402692 NR Desc: putative CDP
  misc_feature: Homolog of GI Number: 16323512 NR Desc: putative phosphatidylglycerophosphate synthase
  misc_feature: Homolog of GI Number: 48733301 NR Desc: COG0558: Phosphatidylglycerophosphate synthase
  misc_feature: Homolog of GI Number: 71734120 NR Desc: CDP
  misc_feature: Homolog of GI Number: 77459287 NR Desc: CDP
  misc_feature: Homolog of GI Number: 28853444 NR Desc: CDP
  misc_feature: Homolog of GI Number: 53693209 NR Desc: COG0558: Phosphatidylglycerophosphate synthase
  misc_feature: Homolog of GI Number: 68345221 NR Desc: CDP
MRKEEPVAAPPRLLTLPTVLTIGRVAAVPLLISTFYMEGPWAAMATTGIFLAAAVTDWLDGYIARKMQLGTPFGAFLDPVADKLMVAATLVLLCTKPLESSLLNDGPWLLTVPSIAIIGREITMSAVREWAASQNSKVLEAVAVNNLGKWKTATQMTALTLLLASRDPSLPAQGALVAPGVALLYVSTGLAVWSLVVYMRKIWRILLK

SEQ ID NO: 9821 - DNA, 993 bp, Zea mays
  misc_feature: Ceres CLONE ID no. 1560255
  misc_feature: Ceres CDNA ID no. 25446561
  CDS (79)..(627): REFERENCED BY SEQ ID NO: 9822
aatcaccaccatctcacttcatataccactccctaggaggacccagcaacacacacagccgagctttgcttaggcaagatgaacaggaagccaggagactgggactgcagggcgtgccagcacctcaacttcagccgccgagacatatgccagcgctgcagcgagccacgtggagttgctgatcgtggcggcggaggaggaggaggcgactacgccagcttcggtggccgcggtggctcctccttcggcggcggctttggcgctgctggctctgacgtccggcctggtgactggtactgctcctgcggcgcgcacaacttcgccagccgctccagctgcttcaagtgctccgcctacaaggaggaggccgctgtgaacagtggcgctggcggctttgacggcgacatgtcacgctcacggggctacggcttcggcagcggtgctgctggtgctggtgctggcgctgcccgtactaccaaccgccccggttggaagtccggagactggatctgcaccagatccggatgcaacgagcacaacttcgccagcaggatggagtgcttcaggtgcaacgcaccgcgggactctggtagcgctgccatgacctacgaaaactacttgcactgaggtgtaggatcgagcaagttaaaaagtctgcagcgccgaagaaagcgacgacaagaggagtcctcatcacgtcgtaacgtaagagagagagagagtagtggatttgcaacaaaaaaaaaaaaagacggccgcgatgctctgttactagctagctagttttgttcaaccacccatgccgtctcttctcttttattagatttggtttggttctcatagccctttaattaccatttgggacctatgtttgctgttctgtttcccgttcgtctcctccgcatgtttgcgcttggatcgagtcttgtgatgtaaccccccaaaaaacgcttgcttaactagtactgttgcttctaaaaaaaaaaaaaaaaa

SEQ ID NO: 9822 - protein, 182 aa, Zea mays; identical to SEQ ID NO: 7486
  misc_feature: Ceres CLONE ID no. 1560255
  misc_feature: Ceres CDNA ID no. 25446561
  misc_feature (4)..(33): Pfam Name: zf PFAM Desc: Zn
  misc_feature: Homolog of GI Number: 48374868 NR Desc: putative zinc finger protein ZF1
  misc_feature: Homolog of GI Number: 50906111 NR Desc: zinc finger transcription factor ZFP30
  misc_feature: Homolog of GI Number: 28849863 NR Desc: zinc finger transcription factor ZFP30
  misc_feature: Homolog of GI Number: 11994340 NR Desc: zinc finger protein
  misc_feature: Homolog of GI Number: 21595771 NR Desc: putative zinc finger protein
  misc_feature: Homolog of GI Number: 5679336 NR Desc: putative zinc finger protein
  misc_feature: Homolog of GI Number: 50948731 NR Desc: putative zinc finger transcription factor ZFP30
  misc_feature: Homolog of GI Number: 42570927 NR Desc: zinc finger
  misc_feature: Homolog of GI Number: 34913970 NR Desc: B1110C07.23
  misc_feature: Homolog of GI Number: 50198944 NR Desc: At2g26695
  misc_feature: Useful for delaying flowering time
  misc_feature: Useful for increasing chlorophyll and photosynthetic capacity
  misc_feature: Useful for making larger plants
  misc_feature: Useful for making ornamental plants with modified flowers
  misc_feature: Useful for making ornamental plants with modified leaves
  misc_feature: Useful for making plants with increased biomass and foliage
  misc_feature: Useful for making plants with increased biomass and foliage
  misc_feature: Useful for making shorter plants
  misc_feature: Useful for making stronger plants
  misc_feature: Useful for sterility

SEQ ID NO: 9823 - DNA, 1322 bp, Zea mays
  misc_feature: Ceres CLONE ID no. 1560340
  misc_feature: Ceres CDNA ID no. 40041469
  CDS (108)..(1010): REFERENCED BY SEQ ID NO: 9824
agcactgctgcagcggcagcccatgcccatcatccagcacgcacacacagacacgtacagagctggtagataggataaaagcagtaatgacttccacgaccaccaccatgtcctctcttgccttggccctcgcgctgctgctcttgagcggtgacatcggcggcgccgcgcggcagctacaggagctcccgaagcctgacctgccgccgttgcccaagcccgaggtgccaccgaggccggacctgccgccgctccccaagcccgaggagcagccgccgttgcccaagccggagctgccggtgccaccgcagccactccccatcccgccgcagccgttgcccaagccagagctgccggtgccaccggagcctctccccgtcccaccgcagccacttcccgtcccgccgcagccgttgcccaagccagaggcagagctgccggtgccaccggagcctctccccgtcccaccgcagccacttcccgtcccgccgcagccgttgcccaagccagaggcagagctgccggtgccaccggagcccctccccgtcccaccgcagccactccccgtcccgccgcagccgttgcccaatccccccgagctgccagtgccaccggagcccctccccgtcccaccgcagcccctgccgaagcccgacgacatgccggtgccacccgagcccctccccaagcccgagctcccggtcccgccgcagcccatgcccaagcctgagcttcccgtcccaccgcagcccctgccgaagcccgacatgccggtgccacccgagtccctccccaagccggagctccccgttccaccagagcccctcccaaagccggagcttccggtgccaccggagcccctccccaagcccgagctccccgttccaccggagcccctcccaaagccggagctgccacccccggtgctgcctggcgagcttccaccgaagccagagttagtcccgctcccgccgaaggctgaaataatgccgccgctgccgaagccatgatcgatgagctacgacgacttcacgggcgcacatatatatatatcgatcgacactgcgctccacgatccaaatatatacgatttgtctactttccattcgatttttttgctgattcatctgcgtgtttggtttggattggacgagggtgtgcatagctaggtagcgcatcttatcagaattgcagcgtggagtgtatattgccatgccatctgattcgtgaccgcgatctgtctatgtactcttgctgagatccatatgtatatacctaataaatggattcgtttgtataaaaaacaaaaaaaaaaaaaaaaa

SEQ ID NO: 9824 - protein, 307 aa, Zea mays
  misc_feature: Ceres CLONE ID no. 1560340
  misc_feature: Ceres CDNA ID no. 40041469
  misc_feature: Homolog of GI Number: 21842 NR Desc: proline
  misc_feature: Homolog of GI Number: 4138732 NR Desc: proline
  misc_feature: Homolog of GI Number: 6523547 NR Desc: hydroxyproline
  misc_feature: Homolog of GI Number: 41400384 NR Desc: plus agglutinin
  misc_feature: Homolog of GI Number: 57472005 NR Desc: minus agglutinin
  misc_feature: Homolog of GI Number: 7861746 NR Desc: GABA
  misc_feature: Homolog of GI Number: 8393396 NR Desc: gamma
  misc_feature: Homolog of GI Number: 11610622 NR Desc: GABA
  misc_feature: Homolog of GI Number: 12831207 NR Desc: gamma
  misc_feature: Homolog of GI Number: 50939019 NR Desc: vegetative cell wall protein gp1 precursor
MTSTTTTMSSLALALALLLLSGDIGGAARQLQELPKPDLPPLPKPEVPPRPDLPPLPKPEEQPPLPKPELPVPPQPLPIPPQPLPKPELPVPPEPLPVPPQPLPVPPQPLPKPEAELPVPPEPLPVPPQPLPVPPQPLPKPEAELPVPPEPLPVPPQPLPVPPQPLPNPPELPVPPEPLPVPPQPLPKPDDMPVPPEPLPKPELPVPPQPMPKPELPVPPQPLPKPDMPVPPESLPKPELPVPPEPLPKPELPVPPEPLPKPELPVPPEPLPKPELPPPVLPGELPPKPELVPLPPKAEIMPPLPKP

SEQ ID NO: 9825 - DNA, 1203 bp, Zea mays
  misc_feature: Ceres CLONE ID no. 1560343
  misc_feature: Ceres CDNA ID no. 40041470
  CDS (61)..(822): REFERENCED BY SEQ ID NO: 9826
aatccacagaaaaaaagcgtcccgcctcatcccgagatcagaatcagaggccacgcggcgatggcgatggcgatgccgatggcagtggcgcgggtgaccagcctcgcctgcgccccccgacaggcgcagcatcgccgccgccatagccttgccccgccgtgcgcctcgggtgcggtggaggtgcgggtctgcacgaaccgcacgtgcgcgcggcagggggggcgcgaggtcctggctgcgctcgcgggcctcgcaccgccggcggtcgacgtggcctcctgcgggtgcctcgggcgctgcggcgccgggcccaacgttgcggcgtccgtccctgggagcaccgcggtgttcggccacgtgggcacggcggcgcgaggcgcgcagctactggagcacctcctcggccccgcggaattcgatgcggccctagggctcaccgcgctggccacgagggagaaggcggaggctgccctcgagaagggaaacgcggacgaagcggaagcccttctcaccgaggttattgggttcaatgcttgtggtggtctgcatttggtgtacatgagcaggtctaaggcgagattggaaattggggatatccctggtgcacttggggatgctgaggaagcaataagaatagctcccagatttcctcaggctcacttattgcgaggcgacacactttttgcaatgggcgaatattctgtcgcggaagatgcctatgcagatgccttggatcttgatccatctattcgtcggtccaagtctttcagggctcgcgtggaaaggctacgagagaagcttgttagtgccaataatccgtagttcattttgaagctctctctccatcagaagttcgatccacaagtaatgtagatatgttcttggtgaaggtaataatgctcacacactttgcaagccactggtcaggaattgattgttgccacagcttggaggatccaacagttcatatgaatgtagggcactgtggtttttcccacctgaacggctgaactacactatgatctacaaacttagaatagtctagtgtattttattgtatgtttatgccctacaatgtaagctactgacttccaaaccatgctagtatgtattgagatttgagagtcattctcatttcagaaaattgtatggctgcactctctgttgatatgatcttggcattctcaaaaaaaaaaaaaaaaa

SEQ ID NO: 9826 - protein, 247 aa, Zea mays
  misc_feature: Ceres CLONE ID no. 1560343
  misc_feature: Ceres CDNA ID no. 40041470
  misc_feature (121)..(146): Pfam Name: TPR_4 PFAM Desc: Tetratricopeptide repeat
  misc_feature (157)..(190): Pfam Name: TPR_2 PFAM Desc: Tetratricopeptide repeat
  misc_feature (191)..(224): Pfam Name: TPR_1 PFAM Desc: Tetratricopeptide repeat
  misc_feature: Homolog of GI Number: 50929587 NR Desc: OSJNBa0018M05.8
  misc_feature: Homolog of GI Number: 53749491 NR Desc: putative TPR domain containing protein
  misc_feature: Homolog of GI Number: 15229091 NR Desc: ferredoxin
MAVARVTSLACAPRQAQHRRRHSLAPPCASGAVEVRVCTNRTCARQGGREVLAALAGLAPPAVDVASCGCLGRCGAGPNVAASVPGSTAVFGHVGTAARGAQLLEHLLGPAEFDAALGLTALATREKAEAALEKGNADEAEALLTEVIGFNACGGLHLVYMSRSKARLEIGDIPGALGDAEEAIRIAPRFPQAHLLRGDTLFAMGEYSVAEDAYADALDLDPSIRRSKSFRARVERLREKLVSANNP

SEQ ID NO: 9827 - DNA, 963 bp, Zea mays
  misc_feature: Ceres CLONE ID no. 1560391
  misc_feature: Ceres CDNA ID no. 25446562
  CDS (93)..(785): REFERENCED BY SEQ ID NO: 9828
actcttctccttttcctcctcctctcctttcctctcctctaggctctagtcctctcgcatccgcagcttccccagccagctagggtttgcagatgacgaccgcggcgcgccccacctgggcgccggccaagggcggcaacgagcaggggggcacccgcatcttcggcccctcccagaagttctcctcccgcgacctcgccgcgcacacctccctcaagccaagaaaagacggtcaacagacccaagaggagttacagaagaggaatctcagggaggaacttgaggaacgtgagcgcaagcactactcttccaaggataagtcctatgccgaagaaagagaccggcggaaaagctctagccatctactcttagaaggttcaaagagagagacagaggataagatagttccacgagaaatcgatgctgatgactccgatgtggagcctaaaagcgatgacgagagcgatgaagatgatgatgacgacgacactgaagctctaatggcagagcttgagaggattaagaaagaaagagccgaggagaagcttagaaaggagcggcaacaagcagaagaggaggccaagatgaaggaggctgaactgatgcggggaaacccgttgattaatatcaacaatgctggctccttcagtgttaagagaaggtgggacgacgacgtggtattcaagaatcaagcacgaggagagaccaagacaccgaaacggttcatcaacgacaccatcaggagtgatttccaccgtaaatttcttcagaggtacatgaagtgacgcttccgtcgttcacaattcagcctggagcccctcatcgttatcatgtttgtgtatgagcgaaagatcattattgtgttgttgtatgaaacaagagtgtaaacatatgtctactacttaacaaagttatgctgagcaatgcatatcctagttgaatgtgacaaaaaaaaaaaaaaaa

SEQ ID NO: 9828 - protein, 230 aa, Zea mays
  misc_feature: Ceres CLONE ID no. 1560391
  misc_feature: Ceres CDNA ID no. 25446562
  misc_feature (1)..(230): Pfam Name: Cwf_Cwc_15 PFAM Desc: Cwf15/Cwc15 cell cycle control protein
  misc_feature: Homolog of GI Number: 46329463 NR Desc: MGC81091 protein
  misc_feature: Homolog of GI Number: 49522089 NR Desc: MGC81909 protein
  misc_feature: Homolog of GI Number: 28829868 NR Desc: similar to T10C6.5.p
  misc_feature: Homolog of GI Number: 23612595 NR Desc: cell cycle control protein cwf15 homologue
  misc_feature: Homolog of GI Number: 23489775 NR Desc: Dictyostelium discoideum HSPC148. 10/100
  misc_feature: Homolog of GI Number: 57095370 NR Desc:  similar to Cohen syndrome 1 protein isoform 5
  misc_feature: Homolog of GI Number: 24580684 NR Desc: CG2839
MTTAARPTWAPAKGGNEQGGTRIFGPSQKFSSRDLAAHTSLKPRKDGQQTQEELQKRNLREELEERERKHYSSKDKSYAEERDRRKSSSHLLLEGSKRETEDKIVPREIDADDSDVEPKSDDESDEDDDDDDTEALMAELERIKKERAEEKLRKERQQAEEEAKMKEAELMRGNPLININNAGSFSVKRRWDDDVVFKNQARGETKTPKRFINDTIRSDFHRKFLQRYMK

SEQ ID NO: 9829 - DNA, 1145 bp, Zea mays
  misc_feature: Ceres CLONE ID no. 1560448
  misc_feature: Ceres CDNA ID no. 36706339
  CDS (174)..(830): REFERENCED BY SEQ ID NO: 9830
cgagtgacatttgtacagctatccataaaattgttgtaaatcactactctctctacagcctttttttgcatactatatatatagtcaaagttcgaagtaaaaaaaaaaaaaaaaaaaggccatagctagagcctagagcagcagcagaggcttgacctgaagctccacccgccatggcattcacgcccgctacggcctgctgcaaggcttccctggcgctggcaccgcgggcgtcgccccgcggcccggcggcctgcgcgcaggcggcgctcctctgcacgccctccacctccgtgttccgcggcctccgggcgcccgcatccgccgcgccggccccgcgccggcgccgctcggcggcgtccacgggcatagtctgcggcaaggtcgccaagggcagcgtgccgccgaacttcaccctcaaggaccagaacggcaagcccgtgtcgctgaacaagttcaagggcaagcccgtcgtggtttacttctaccccgccgacgagacgcccggatgcacaaagcaggcgtgcgcgttcagggactcgtacgagaagttcaagaaggccggggcggaggtgatcggcatcagcggcgacgacgcggcgtcgcacaaggcgttcgcgcagaagtaccggctgccgttcacgctgctgagcgacgaggggaaccgcgtgcgcaaggagtggggcgtcccctcggacctgttcgggacgctgccggggcgccagacgtacgtgctggacaagcagggcgtcgtgcagtacgtctacaacaaccagttccagcccgagaagcacatcggcgagacgctcaagatcctgcagaccctctgatccgatcaacctcctcactgttctgggccatgctctgcattcgtcgctgtaaaagtaccggactatgtagtagtgtagtgtatgtaaccaagagctgatgacctgatgttttgttccatccttcagtgagtctatctatcacacgattctggctcgtttgatcgaccagcatcttcctgtttgtcatggtcagtttcacttgtattacaactgtacttttggtcgacagtctcagatgttgtagctcgttcaacccaaaccggtcaggattgtgatcgatacatccatctgtggaggtaaaaaaaaaaaaaaaaa

SEQ ID NO: 9830 - protein, 218 aa, Zea mays
  misc_feature: Ceres CLONE ID no. 1560448
  misc_feature: Ceres CDNA ID no. 36706339
  misc_feature (73)..(212): Pfam Name: AhpC PFAM Desc: AhpC/TSA family
  misc_feature: Homolog of GI Number: 55833012 NR Desc: peroxiredoxin Q
  misc_feature: Homolog of GI Number: 51090743 NR Desc: putative peroxiredoxin Q
  misc_feature: Homolog of GI Number: 6899842 NR Desc: peroxiredoxin Q
  misc_feature: Homolog of GI Number: 42795441 NR Desc: peroxiredoxin Q
  misc_feature: Homolog of GI Number: 34420838 NR Desc: peroxiredoxin Q
  misc_feature: Homolog of GI Number: 39748708 NR Desc: peroxiredoxin Q
  misc_feature: Homolog of GI Number: 9279611 NR Desc: peroxiredoxin Q
  misc_feature: Homolog of GI Number: 17230675 NR Desc: bacterioferritin comigratory protein
  misc_feature: Homolog of GI Number: 53764918 NR Desc: COG1225: Peroxiredoxin
  misc_feature: Homolog of GI Number: 23125049 NR Desc: COG1225: Peroxiredoxin
MAFTPATACCKASLALAPRASPRGPAACAQAALLCTPSTSVFRGLRAPASAAPAPRRRRSAASTGIVCGKVAKGSVPPNFTLKDQNGKPVSLNKFKGKPVVVYFYPADETPGCTKQACAFRDSYEKFKKAGAEVIGISGDDAASHKAFAQKYRLPFTLLSDEGNRVRKEWGVPSDLFGTLPGRQTYVLDKQGVVQYVYNNQFQPEKHIGETLKILQTL

SEQ ID NO: 9831 - DNA, 1469 bp, Zea mays
  misc_feature: Ceres CLONE ID no. 1560624
  misc_feature: Ceres CDNA ID no. 25402886
  CDS (425)..(1234): REFERENCED BY SEQ ID NO: 9832
actcctcattgtcatctctccctctctctctctctctctctctctctccattgcactcgctctatactaggtccaaggtaactagcaattgagctattaaattgttgcttgaggtgcagcagaaaggcacactgctacaaacaagctgatcagctgatgcccggtggcttcaggactttgccaaggttagcgaggtcccgcccaatttgcttctcccctgggcttgcggttgcgtttgagtgcacccctgaggctttgattgggccctcccgctccgcacttaagctctccgcctcgtccatggcgtcgcagccctcaagacttgctgtctcttggtagctgccgcttctagctactccaccacctaactgaaagagcgtatagttagttggtcttggattcttggtccggtgctgccgccgccatgttcctgagatcgaagatccaggagatgatcctgcggaggagatcgaggtcgatgaacagcgccggcgcgcagaggggccacgtccccgatcaggccccgagctcgtcgaccgttccgtgcgacgatgacagtgccggcgccggcggcagcaggagcgcgggtgcgcgtgccctgttcgcctccccgaggctgctgcactcgtcctccctgcccgccggcgccggcgccggcgtcgtcgccttcgccaggagccccgcggccgagcccgagcccgagacggcctcctccctgagcccgacctccgtgctggacgcggcggcggccttcgtgccacgcacgggcggcggcgcgggcaagcggcgccagcgccgcccgtggcgcgcgcgggacagcaacggcggcctcgcggacgtgctggactgcactgatgaccagcagcagcaggagcggatcgtcctcgcggctacgtcgtcctcgtgctctctgctcaggtcgtgctccctggaccgccgcgtcgagttcggcgtgaagaacaagagctcgtggctgcccctccgcggccgcggcgagcccgcggcgccggcgccggccgacccgcgcgagatcgggccgtcgtcggaggactacacgtgcgtcatctcccgcgggcccaacccgaggacggtgcacatcttcggcgaccgcgtcgtggagggcggcgccgcaccggaacaggagacggagagctcgccgcggccgatcagtctgccgacgcgaacggatccgcgtccacgcacgcgtagcctgatgagtgatgacgccgcctagctaggtaaagaaaccgagtttaattagctgagtgctattattgagttcaggcagccttgatgttgctgtattgtattggttgctccgatgcgttccatcgtctgatcagaagatagatagagttgatcattcataggtgttttcttgatcagatgatgaactagacgttttgtccaggttgagctgaagctgtgatataaatttgatcatgttgttaataaaaaaaaaaaaaaaa

SEQ ID NO: 9832 - protein, 269 aa, Zea mays
  misc_feature: Ceres CLONE ID no. 1560624
  misc_feature: Ceres CDNA ID no. 25402886
  misc_feature: Homolog of GI Number: 66778264 NR Desc: LigA
  misc_feature: Homolog of GI Number: 67662871 NR Desc: regulatory protein
  misc_feature: Homolog of GI Number: 29247944 NR Desc: GLP_26_54603_52153
  misc_feature: Homolog of GI Number: 2078483 NR Desc: antifreeze glycopeptide AFGP polyprotein precursor
  misc_feature: Homolog of GI Number: 57472005 NR Desc: minus agglutinin
  misc_feature: Homolog of GI Number: 66777231 NR Desc: Ferric
  misc_feature: Homolog of GI Number: 66779249 NR Desc: similar to ATP
  misc_feature: Homolog of GI Number: 66777827 NR Desc: MaoC
  misc_feature: Homolog of GI Number: 66778368 NR Desc: Cytochrome c biogenesis protein
  misc_feature: Homolog of GI Number: 871498 NR Desc: DNA binding protein
MFLRSKIQEMILRRRSRSMNSAGAQRGHVPDQAPSSSTVPCDDDSAGAGGSRSAGARALFASPRLLHSSSLPAGAGAGVVAFARSPAAEPEPETASSLSPTSVLDAAAAFVPRTGGGAGKRRQRRPWRARDSNGGLADVLDCTDDQQQQERIVLAATSSSCSLLRSCSLDRRVEFGVKNKSSWLPLRGRGEPAAPAPADPREIGPSSEDYTCVISRGPNPRTVHIFGDRVVEGGAAPEQETESSPRPISLPTRTDPRPRTRSLMSDDAA

SEQ ID NO: 9833 - DNA, 1490 bp, Zea mays
  misc_feature: Ceres CLONE ID no. 1560806
  misc_feature: Ceres CDNA ID no. 25446765
  CDS (48)..(1196): REFERENCED BY SEQ ID NO: 9834
agaccagcacgtcacgtgcggcggacaggggtcaagcgcggtcgccgatgtcggcggcgggcggcagccgcgcttgcgccacctcgcggcccgcggtggcagcatggctgctgctggcgctggccgcagcagcagtgtcggcgctggcgctgctgccggcggcggcgggcggcttcagctgccgtcctgggtcccggccggtgctcttcaacttcggggactccaactccgacacgggcggcatggcggcggccaaggggtggcacctcacgcgcccggagggccgcgccttcttcccacgccccaccggccggttctgcgacggccgcctcgccatcgacttcctctgcgaaagcttgaacatcagctatttgagcccatttctgaaggcgttaggctccaattacagcaacggtgcaaatttcgccattgctggcgcagcaacgcaaccgcgagatgttccatttgcgttgcacatacaagtgcaggagttcttgtacttcagagatagatccttggaactcatcgatcaaggtctaagtggtccaattgatgcacaaggattccaaaacgctctatatatgatagacatagggcagaacgatgtaaacgctcttctgtcaaactcgccctatgatcaagttattgccaaattcccaccaattcttgctgagattaaggacgctgtccagactctatatagcaacggtagccgaaacttctggatacatgggacgggggctctgggttgcctgccgcagaagcttgccataccaaggaaaaacgacagcgatcttgatcagtatggctgtctcaagacctataacagagctgcagttgcgttcaacgccgcgctgggcagcctctgcgacgagctgagtgcgcagatgaaagacgcgacgcttgtgtacacggacctgttccccatcaagtatgatcttgtcgccaaccacactaaatatggctttgacaagccgctgatgacatgctgtgggtacggagggcctccctacaactacgatttcagcaagggttgtcagtctaaggatgtggcggcctgcgatgacggctcgaagttcgtcagctgggatggcgtgcacctgacggaggcggccaatgcggttgtggccagagcgatactgagctcacagtactcgaagcccagtctcaagtttgatcagttctgcagagcctgatacttgttagtacctcataccgtgccttttagtttaggcaaatttactgaacacaactgggcacttcaaagtcaaaatgggtggatccgcttctgataatttgattaccttatttacccgtcagggatgtgacccatcattgatctgtcagccatagcccataggccataactttggataggtgaaacttccaaatattgtgggccacatgtaccttcaaactacatgtcctatctgatatgttctcatcaaagagagaaatacaccatgggttattaaaaaaaaaaaaaaaaa

SEQ ID NO: 9834 - protein, 382 aa, Zea mays
  misc_feature: Ceres CLONE ID no. 1560806
  misc_feature: Ceres CDNA ID no. 25446765
  misc_feature (53)..(364): Pfam Name: Lipase_GDSL PFAM Desc: GDSL
  misc_feature: Homolog of GI Number: 34894844 NR Desc: putative lipase homolog
  misc_feature: Homolog of GI Number: 34894866 NR Desc: putative lipase homolog
  misc_feature: Homolog of GI Number: 53791335 NR Desc: putative early nodule
  misc_feature: Homolog of GI Number: 34894838 NR Desc: putative lipase homolog
  misc_feature: Homolog of GI Number: 50932193 NR Desc: putative GDSL
  misc_feature: Homolog of GI Number: 3482914 NR Desc: Similar to nodulins and lipase
  misc_feature: Homolog of GI Number: 53791598 NR Desc: putative lipase homolog
  misc_feature: Homolog of GI Number: 45773932 NR Desc: At3g62280
  misc_feature: Homolog of GI Number: 15218753 NR Desc: lipase
  misc_feature: Homolog of GI Number: 56784068 NR Desc: putative esterase
  misc_feature: Useful for sterility
MSAAGGSRACATSRPAVAAWLLLALAAAAVSALALLPAAAGGFSCRPGSRPVLFNFGDSNSDTGGMAAAKGWHLTRPEGRAFFPRPTGRFCDGRLAIDFLCESLNISYLSPFLKALGSNYSNGANFAIAGAATQPRDVPFALHIQVQEFLYFRDRSLELIDQGLSGPIDAQGFQNALYMIDIGQNDVNALLSNSPYDQVIAKFPPILAEIKDAVQTLYSNGSRNFWIHGTGALGCLPQKLAIPRKNDSDLDQYGCLKTYNRAAVAFNAALGSLCDELSAQMKDATLVYTDLFPIKYDLVANHTKYGFDKPLMTCCGYGGPPYNYDFSKGCQSKDVAACDDGSKFVSWDGVHLTEAANAVVARAILSSQYSKPSLKFDQFCRA

SEQ ID NO: 9835 - DNA, 1637 bp, Zea mays
  misc_feature: Ceres CLONE ID no. 1560885
  misc_feature: Ceres CDNA ID no. 25446766
  CDS (82)..(1524): REFERENCED BY SEQ ID NO: 9836
agtcactagggtgccttctcacagcactgattgtccacccaccactctacgcaagcaatccttcggacttcggtgggggaaatggaggccgccgccgccgccgagacggggctcgcccagaaaccggttgtgctgtacccttcgccggggatgggccacctggtctccatgatcgagcttggcaagatcctcggcgcgcggggactgtccgtaataattgtcgtcgtcgagcctcccttcaacacgggcgctacgtcgcctttcctcgccggcgtctccgcggccaacccgtccatctccttccaccgcctgcccaaagtcgagcgcctcccgcccgtcaagaccaagcaccaggaggcgctcaccttcgaggtcacccgcgtctccaacccgcacctccgcgagttcctggccgccgcgtccccagccgtgctcgtcgtcgacttcttctgcagcatcgccctggacgtggcggaggagctccgcgtgcccgcctacttcttcttcacctcgggcgccgaggtcctggccttcttcctgcacctcccggcgatccacgagcggaccgccgcgagcttccaggacatggggaaggagctcgtgcacgtgccgggcatcccgtcgttcccggcgacgcactgcatcctgcccaccatggagcgcgacgacgtggcctacgacggcttcctaaagggctgtaccgacctctgccgctcccagggcatcatggtcaacacgttccgctcgctggagcagcgcgccgtcgagaccgtggccgcgggccactgcacgccccccggcctcccgaccccgcccatctactgcatcgggccactcatcaagtccgaggaggtgctgggcaagggcggcgaggagtgcctggcttggctggacgcgcagcccagggccagcgtggtgttcctctgcttcggcagcatcggccggttcagcgtggagcagatcagggaggtggcggccggcctggaagccagcgggcagcggttcttgtgggtggtccgagccccgcccagcgacgacccggccaagaagttcgagaggccgccggagccggaccttgacgcgctcctcccggaggggttcctggcccggaccaaggataggggtctcgtggtcaggtcgtgggcgccgcagcgggacgtgctggcgcacgcgtccgtgggcggcttcgtgacgcactgcggctggaactcggtcctggaggcggtgatggcgggcgtgccgatggtggcgtggccgctctacgcggagcagcggctcaaccgggtgttcctggagaaggagatgcagctggccgtggccgtggaagggtacgacagcgacgagggcatcgtggcggccgaggaggttgctgccaaggtgcgatggctcatggagtccgatggcgggaggatgctccggaagcgcacgctggcggccatgcggcaggccaaggacgcgctgcgtgagggcggtgagtcggaggccacactgaccggattggtggacgagtggaaacgcatttgacgcggtatgtggggattgggaacgtgtgacgtactgacgttacgcgacggatgaagtgtcggtcatcatttttttaaataaaatatatattagtaataaaaaaaaaaaaaaaa

SEQ ID NO: 9836 - protein, 480 aa, Zea mays
  misc_feature: Ceres CLONE ID no. 1560885
  misc_feature: Ceres CDNA ID no. 25446766
  misc_feature (266)..(400): Pfam Name: UDPGT PFAM Desc: UDP
  misc_feature: Homolog of GI Number: 34910208 NR Desc: putative flavonol glucosyltransferase
  misc_feature: Homolog of GI Number: 50901976 NR Desc: putative glucosyltransferase
  misc_feature: Homolog of GI Number: 57899319 NR Desc: putative UDP
  misc_feature: Homolog of GI Number: 52353386 NR Desc: putative flavonol glucosyltransferase
  misc_feature: Homolog of GI Number: 50428670 NR Desc: putative UDP
  misc_feature: Homolog of GI Number: 34910228 NR Desc: putative flavonol glucosyltransferase
  misc_feature: Homolog of GI Number: 52353384 NR Desc: putative flavonol glucosyltransferase
  misc_feature: Homolog of GI Number: 52353385 NR Desc: putative flavonol glucosyltransferase
  misc_feature: Homolog of GI Number: 52353387 NR Desc: putative flavonol glucosyltransferase
  misc_feature: Homolog of GI Number: 37993667 NR Desc: UDP
MEAAAAAETGLAQKPVVLYPSPGMGHLVSMIELGKILGARGLSVIIVVVEPPFNTGATSPFLAGVSAANPSISFHRLPKVERLPPVKTKHQEALTFEVTRVSNPHLREFLAAASPAVLVVDFFCSIALDVAEELRVPAYFFFTSGAEVLAFFLHLPAIHERTAASFQDMGKELVHVPGIPSFPATHCILPTMERDDVAYDGFLKGCTDLCRSQGIMVNTFRSLEQRAVETVAAGHCTPPGLPTPPIYCIGPLIKSEEVLGKGGEECLAWLDAQPRASVVFLCFGSIGRFSVEQIREVAAGLEASGQRFLWVVRAPPSDDPAKKFERPPEPDLDALLPEGFLARTKDRGLVVRSWAPQRDVLAHASVGGFVTHCGWNSVLEAVMAGVPMVAWPLYAEQRLNRVFLEKEMQLAVAVEGYDSDEGIVAAEEVAAKVRWLMESDGGRMLRKRTLAAMRQAKDALREGGESEATLTGLVDEWKRI

SEQ ID NO: 9837 - DNA, 1303 bp, Zea mays
  misc_feature: Ceres CLONE ID no. 1560908
  misc_feature: Ceres CDNA ID no. 25446971
  CDS (49)..(1143): REFERENCED BY SEQ ID NO: 9838
aacggcacggccacagctgactgactcatcctgcgttgtccgataatcatggctagagctccgctgctcctcgcgctgctgtgcgcgtgcgccgccgccgccggctccgccaatgcggcggcggggaggaagatggtcggcgtgtacgagctcaaggcgggcgatttctccgtcggcgtcaccaactggggcgccaccatcacctccgttgtgctgccggactccaaaggggattttgctgacgtcgtgcttggctacgacaccattggaggatacgtgagtggtaaaagctacttcggagcgcttgtcggacgagtggccaacaggatcgccaacgcgcgcttcgtgctcgacggaaaggcttaccatcttttcaagaacgacggcaacaacacgcttcatggtggccatagggggttcagtcaggttgtatggacggttaaagagttcgtcggtggcggtgactcaccctacatcacgttgtactaccacagcttcgatggagaacaaggtttcccaggcgacctggacgtgtacgtgacgtaccagctggcggccccctacgtgctgcgggtgcacatgaacgcgacggccgtgaacaaggcgaccccggtgaacctggcgcagcacacgtactggaacctgggcgggcagggcagcggcgacgtcctccgcaacacggtgcagctgttcgcgtcccggtacacgcccgtgggcggcggcctcatcccgacgggcgcggtggcgcccgtggccggcacgccctacgacttcctcgcgccggccgcggtgggctcgcgcatccgccaggtctccggcggcaaggccggcgtctacggctacgacaccaactacgccgtggacggggagcccggggcgctgcggaaggtggccgtcgtccgggacggcgcgtccggccgggcgctggagctgtgggccaaccagcctggggtgcagttctacacgggcaacttcctccaggacgtcaaggggaagggcggcaaggtgtaccagcagtacggcgcgctgtgcctcgagacgcaggggttcccggacgccgtcaaccaccccgatttcccctcccagatcgtcaggccggggcaggtgtacaagcacgacatggtgttcaagttctccttctagccgctctgtataggcaacaccctggtccctggctggctaatcaatctactagtacctgttatgattgtcactggcaaagtggcaactgggccttattgggactggagacacacgttacatgattccaaaaaaaaaaaaaaaaaaaaaaaaaaaaaaaaaa

SEQ ID NO: 9838 - protein, 364 aa, Zea mays
  misc_feature: Ceres CLONE ID no. 1560908
  misc_feature: Ceres CDNA ID no. 25446971
  misc_feature (32)..(361): Pfam Name: Aldose_epim PFAM Desc: Aldose 1
  misc_feature: Homolog of GI Number: 50924772 NR Desc: OSJNBa0036B21.18
  misc_feature: Homolog of GI Number: 50924776 NR Desc: OSJNBa0036B21.19
  misc_feature: Homolog of GI Number: 50909807 NR Desc: putative non
  misc_feature: Homolog of GI Number: 50920801 NR Desc: putative aldose 1
  misc_feature: Homolog of GI Number: 15824567 NR Desc: non
  misc_feature: Homolog of GI Number: 15824565 NR Desc: non
  misc_feature: Homolog of GI Number: 21537069 NR Desc: aldose 1
  misc_feature: Homolog of GI Number: 28416453 NR Desc: At3g47800/T23J7_130
  misc_feature: Homolog of GI Number: 2739168 NR Desc: aldose
  misc_feature: Homolog of GI Number: 7671483 NR Desc: putative aldose 1
MARAPLLLALLCACAAAAGSANAAAGRKMVGVYELKAGDFSVGVTNWGATITSVVLPDSKGDFADVVLGYDTIGGYVSGKSYFGALVGRVANRIANARFVLDGKAYHLFKNDGNNTLHGGHRGFSQVVWTVKEFVGGGDSPYITLYYHSFDGEQGFPGDLDVYVTYQLAAPYVLRVHMNATAVNKATPVNLAQHTYWNLGGQGSGDVLRNTVQLFASRYTPVGGGLIPTGAVAPVAGTPYDFLAPAAVGSRIRQVSGGKAGVYGYDTNYAVDGEPGALRKVAVVRDGASGRALELWANQPGVQFYTGNFLQDVKGKGGKVYQQYGALCLETQGFPDAVNHPDFPSQIVRPGQVYKHDMVFKFSF

SEQ ID NO: 9839 - DNA, 1713 bp, Zea mays
  misc_feature: Ceres CLONE ID no. 1561021
  misc_feature: Ceres CDNA ID no. 25446767
  CDS (110)..(1366): REFERENCED BY SEQ ID NO: 9840
aaagaatcccgccagttgccttccacttccgccagactccgcgttcctcctgactcctgagcagctgccgcctgcccgagagtggagggggaggcaggcgcccaggccaatgggtgggacggggagcgcgacggcggcgcaggccctggcgctcgccgccttgctcctcgcctgctccggcgtcgccgtcgtcacggcgcaggacatcgagcggatccaaggaagtgccggcgacgtgctggaggacgaccccgtcgggcggctcaaggtgtacgtgtacgagctgccccccaagtacaacaagaacgtggtggcgaaggactcgcggtgcctgagccacatgttcgccacggagatcttcatgcaccgcttcctgctggcgagcgcggtccggaccctgaacccggacgaggcggactggttctacaccccggtctacaccacgtgcgacctcacgccgtggggccatcccctcaccgtcaagtccccgcggatgatgaggagcgccatccagtacgtctccaagcgctggccctactggaacaggacggagggggccgaccatttcttcgtcactccacatgactttggagcgtgcttctacttccaggaagagaaggccatccagcgaggtgtcctcccggtgctgcgccgcgctacgctggtccagacgtttgggcagaagaaccatgtctgcctcagggaaggctccatcaccatcccgccatacgctccgcctcacaagataagagctcatatcgtcccgccagagacgcctcggtcgatcttcgtctacttccgcggcctgttctacgacaccgcgaacgaccccgagggtggttactatgcaaggggcgcccgtgcgtcggtgtgggagaacttcaagaacaacgcgctgttcgacatctcgacggagcacccgccgacgtactacgaggacatgcagcgcgccatcttctgcctgtgcccgctgggctgggcgccgtggagcccgcgcctggtggaggccgtggtgttcggctgcatccccgtcatcatcgccgacgacatcgtgctgcccttcgcggacgccatcccgtgggaggagatcgccgtgttcgtgcccgaggacgacgtcctgaggctggacaccatcctcacgtccatccccatggacgagatcctccgcaagcagaggctgctggccaacccgtccatgaagcaggcgatgctgttcccgcagcccgcggagccgagggacgccttccaccaggtcctcaacgggctggcgcgcaagctgccccacgccaaggacgtcttcctcaagcccggccagaaggtgctcaactggacagagggcacccaggatgacctcaagccgtggtaggccgtcgtggctgctgctcttttgtaaacgacacaaccagatcgatgatggtgatgctgatgagtgaaccacacaaccattggttaaatgtaaagctcttaatcctcttgctcctccaacctttcttctttttgaggcaatgtgcatgtcttgcctgtatatatacactagtacatgacaatcagggtggccggccggagcaagacaaattgaggtgccaacacacttagtattagtattatattctagcatgtatgttttggcggcaattcctttctttagaactcggtatagcagagggacagacccgacgtttttttgttttgtttagaaaaaaaaaaaaaaaa

SEQ ID NO: 9840 - protein, 418 aa, Zea mays
  misc_feature: Ceres CLONE ID no. 1561021
  misc_feature: Ceres CDNA ID no. 25446767
  misc_feature: null
  misc_feature: Useful for making plants with altered cell wall content and/or composition
  misc_feature (54)..(176): Pfam Name: Exostosin PFAM Desc: Exostosin family
  misc_feature: Homolog of GI Number: 17978869 NR Desc: AT5g61840/mac9_140
  misc_feature: Homolog of GI Number: 50923967 NR Desc: OSJNBa0039C07.13
  misc_feature: Homolog of GI Number: 50904387 NR Desc: OSJNBa0093F16.12
  misc_feature: Homolog of GI Number: 50904389 NR Desc: OSJNBa0093F16.13
  misc_feature: Homolog of GI Number: 15223522 NR Desc: exostosin family protein
  misc_feature: Homolog of GI Number: 50909023 NR Desc: putative pectin
  misc_feature: Homolog of GI Number: 60657598 NR Desc: secondary cell wall
  misc_feature: Homolog of GI Number: 48958521 NR Desc: At5g22940
  misc_feature: Homolog of GI Number: 60657602 NR Desc: secondary cell wall
MGGTGSATAAQALALAALLLACSGVAVVTAQDIERIQGSAGDVLEDDPVGRLKVYVYELPPKYNKNVVAKDSRCLSHMFATEIFMHRFLLASAVRTLNPDEADWFYTPVYTTCDLTPWGHPLTVKSPRMMRSAIQYVSKRWPYWNRTEGADHFFVTPHDFGACFYFQEEKAIQRGVLPVLRRATLVQTFGQKNHVCLREGSITIPPYAPPHKIRAHIVPPETPRSIFVYFRGLFYDTANDPEGGYYARGARASVWENFKNNALFDISTEHPPTYYEDMQRAIFCLCPLGWAPWSPRLVEAVVFGCIPVIIADDIVLPFADAIPWEEIAVFVPEDDVLRLDTILTSIPMDEILRKQRLLANPSMKQAMLFPQPAEPRDAFHQVLNGLARKLPHAKDVFLKPGQKVLNWTEGTQDDLKPW

SEQ ID NO: 9841 - DNA, 1094 bp, Zea mays
  misc_feature: Ceres CLONE ID no. 1561022
  misc_feature: Ceres CDNA ID no. 25446631
  CDS (36)..(818): REFERENCED BY SEQ ID NO: 9842
atgctcggctcggctgtgcctgtgtccccccgaaaatggcctcgtccccgctcttcacctcgctccggctgcccgtgcccaccatcataccgcgctgtgcttctccgccgcacggcgtgccctcggcggacgacgccgtccctcggccggcgcctctcgtggcggccgctagccacaggagggagctggtggtaggggcggcgctgaccgcggtgctgttgccgagggcgcgcgaggtcgcggtcggcacgtacctgccaccggcgccgtccaacccgggcttcgtcttcttccgcgccacctccaaggacacccccgcgctccgcgccggcaatgtggaaccgtacgagttcatcctgccgccgacctggaagcagacgcgcgtcgccaacatcctgtccgggaactacttccagcccaagtgcgccgagccgtgggtggaggtgaagttcgaggacgagaagcagggcaaggtgcaggtggtggcctcgccgctcatccgcctcaccaacaagcccaacgccacgatcgaggacatcggcagccccgagaggctgatcgcctcgctggggcctttcgtcaccggcaacaccttcgactccgacgagctcgtcgacaccaacgtcgagaacgtcgatggacagacttactacagctacgtgctggagactccattggcgctaacaggttcgcacaacctggccaaggccaccgccaaggggagcacggtggtgctgttcgtcgcaagcgccaacgacaagcagtggccggcgtcgcagaaggttctgaaagccatagtggactcgtttcaaatatgactggtttgggtgatgcgttacgttgttggcaacatctatcggcctttttgacttgagttcagttgagttgcttgtacccgaagctctaaaatacgaggtatatataagcttataaagccaaaagggaaaagaaggcactgcttgttttaggcttgagtcacggttgctgttcgtagcttgtcgaagacgacatgtcagatgtacatgtacacggaaatgaactttttcagtaacgaaatgctggttaatatcttgacactaaaaaaaaaaaaaaaa

SEQ ID NO: 9842 - protein, 260 aa, Zea mays
  misc_feature: Ceres CLONE ID no. 1561022
  misc_feature: Ceres CDNA ID no. 25446631
  misc_feature (61)..(260): Pfam Name: PsbP PFAM Desc: PsbP
  misc_feature: Homolog of GI Number: 55296826 NR Desc: thylakoid lumenal 20 kDa protein
  misc_feature: Homolog of GI Number: 34909044 NR Desc: P0034E02.35
  misc_feature: Homolog of GI Number: 30699237 NR Desc: thylakoid lumenal 29.8 kDa protein
  misc_feature: Homolog of GI Number: 7248459 NR Desc: arabinogalactan protein
  misc_feature: Homolog of GI Number: 66780099 NR Desc: PE
MASSPLFTSLRLPVPTIIPRCASPPHGVPSADDAVPRPAPLVAAASHRRELVVGAALTAVLLPRAREVAVGTYLPPAPSNPGFVFFRATSKDTPALRAGNVEPYEFILPPTWKQTRVANILSGNYFQPKCAEPWVEVKFEDEKQGKVQVVASPLIRLTNKPNATIEDIGSPERLIASLGPFVTGNTFDSDELVDTNVENVDGQTYYSYVLETPLALTGSHNLAKATAKGSTVVLFVASANDKQWPASQKVLKAIVDSFQI

SEQ ID NO: 9843 - DNA, 1043 bp, Zea mays
  misc_feature: Ceres CLONE ID no. 1561033
  misc_feature: Ceres CDNA ID no. 40352045
  CDS (103)..(747): REFERENCED BY SEQ ID NO: 9844
aagggaaaaagaaggcaggactggcaagaaggaaacagaggtccgcgagcaaacgccttcaagcccatctcggtagccggagaacgagcagcagcggaggcgatggcgtccccggatcccggccacacgccggcgcaaggcgaggaatctgcctccccctcctcgtggcctccccgaaagctccagagtttcacaccagggctgtggtcacaatacaaagcttatgaggatgcagttgtggagaacattaaaggaactattgcggatgctctggttcttgtgagagagcatcaggcggaggcaattggatgtgccactgttgcaggattcattctgttcagaggccctcgaagatttttataccgcaatacctttggccgtttaaagactgagaaggatttactgaatgatgccgagcaaagtatgatggagtaccaaacatctattcagaacttgaagaaagaatcaaaatacactcttgacaaagtagctatcggtgaaagcgatgtgcagcgtgggcgaactgatctgagatctactgggaagcagatacaatctcttataggttccatttacaaagcagaatctacagctgcaggtctgatggatagactaagaaccattccaaccaggcaatctctcgagctgcgagcagaggtggcttccatggcctccgatttgaagaaccagaggtgtgccttgcaggaaaggatcaacaaaatatctgaatatggtgtccgtgtctgaactgctgcaccgtctgtacatttcccctcatagagcctcttttggtcctcccgtacaataaactgtgaatccaccgtgaggtgcgcgttttggttagacaggttccgattctaaccatattttctgtcagcattttgaatgctaggacagacatggtaactcatcacaaccataaattgttcctatcactttaacgttgagcattgctcgtttctgggaagcagatgggctgatggctactatcttatatatgcgattgcaaggaaaaaaaaaaaaaaaaaaaaaaaaaaaaaaaa

SEQ ID NO: 9844 - protein, 214 aa, Zea mays
  misc_feature: Ceres CLONE ID no. 1561033
  misc_feature: Ceres CDNA ID no. 40352045
MASPDPGHTPAQGEESASPSSWPPRKLQSFTPGLWSQYKAYEDAVVENIKGTIADALVLVREHQAEAIGCATVAGFILFRGPRRFLYRNTFGRLKTEKDLLNDAEQSMMEYQTSIQNLKKESKYTLDKVAIGESDVQRGRTDLRSTGKQIQSLIGSIYKAESTAAGLMDRLRTIPTRQSLELRAEVASMASDLKNQRCALQERINKISEYGVRV

SEQ ID NO: 9845 - DNA, 1018 bp, Zea mays
  misc_feature: Ceres CLONE ID no. 1561034
  misc_feature: Ceres CDNA ID no. 25446563
  CDS (129)..(869): REFERENCED BY SEQ ID NO: 9846
aaagaagagtggcggcggcgggccggcggcgtgtataggcgtgttcccgagcagaggcccccccaaacgcgcagcgcacacaaacacacaccagcccagctccgagagatcatccggcggccggcgagatgagccgcggcacgggcgcgggttatgaccgccacatcaccattttctcccctgagggacgcctgtaccaagtcgagtacgcgttcaaggcggtgaagtcggcgggtgtcacgtcgatcggcgtccgcggcgcggactccgtctgcgtcgtcacccagaagaaagtcccggacaagttgctggatcagacgagcgtgacacacttgttcccgatcaccaagtacgtcggattgcttgccactggcctcacagctgatgcaaggtcattggtttcccaagcaaggaacgaagcagctgagtttcgtttcaaatggggctatgagatgccagttgatgtgttagcaaaatggattgctgacaaagctcaagtttacacgcaacatgcatacatgagaccccttggagtagttgctatggtcttgggctacgacgaagagaaaaatgcacaactattcaaatgcgaccctgcgggtcacttctttggacataaggcaactagtgccgggctcaaggagcaggaagcaataaattttttggagaagaaaatgaaggatgacccgaaattcacctatgatgaaactgttcagattgcaatatctgcattgcaatcagttctccaggaagatttcaaggccactgagatcgaagttggtgttgtgagaaaagaagaacgtcttttcagagttctcacaacagaggagattgaccagcacctgacggcaattagtgaacgggactgagctgccatatgttggacatttgatccctccacactgcgccgtgccattgtgcttcagcactgccatttagtttgacatcaaatgaactgagtgtaccatttcatgtctaacactgaaaacaagctcgttgattaaaaaaaaaaaaaaaa

SEQ ID NO: 9846 - protein, 246 aa, Zea mays; identical to SEQ ID NO: 504
  misc_feature: Ceres CLONE ID no. 1561034
  misc_feature: Ceres CDNA ID no. 25446563
  misc_feature (32)..(220): Pfam Name: Proteasome PFAM Desc: Proteasome A
  misc_feature: Homolog of GI Number: 11967891 NR Desc: maize 20S proteasome alpha subunit
  misc_feature: Homolog of GI Number: 50920359 NR Desc: Putative alpha 1 subunit of 20S proteasome
  misc_feature: Homolog of GI Number: 4539545 NR Desc: PRCI
  misc_feature: Homolog of GI Number: 23505817 NR Desc: At2g05840/T6P5.4
  misc_feature: Homolog of GI Number: 3377794 NR Desc: proteasome IOTA subunit
  misc_feature: Homolog of GI Number: 10176805 NR Desc: multicatalytic endopeptidase complex alpha subunit
  misc_feature: Homolog of GI Number: 21386959 NR Desc: multicatalytic endopeptidase complex alpha subunit
  misc_feature: Homolog of GI Number: 2511588 NR Desc: multicatalytic endopeptidase complex
  misc_feature: Homolog of GI Number: 3421070 NR Desc: 20S proteasome subunit PAA1
  misc_feature: Homolog of GI Number: 79322198 NR Desc: PAA2
  misc_feature: Useful for delaying flowering time
  misc_feature: Useful for increasing chlorophyll and photosynthetic capacity
  misc_feature: Useful for increasing increasing anthocyanin content
  misc_feature: Useful for making ornamental plants with modified flowers
  misc_feature: Useful for making ornamental plants with modified leaves
  misc_feature: Useful for making shorter plants

SEQ ID NO: 9847 - DNA, 1050 bp, Zea mays
  misc_feature: Ceres CLONE ID no. 1561131
  misc_feature: Ceres CDNA ID no. 25446623
  CDS (130)..(834): REFERENCED BY SEQ ID NO: 9848
actgtcgccgacgactacgccaggtcttcttcggggcccaggtcgctgccgcctacatcaggggccccaagttttcctagcacccctcgccggcgacgagcaccaccagcttggttcactcccaacaaaatgtcagccaatgtgggtgaatcaactagcggtgtcagcagcagcgatgcagctggggggagctttgagtgcaacatatgcttcgagctgcctcaggagccaatagtgactctctgtggccacctcttctgctggccgtgcctttaccggtggctgcacattcacgcacactcgccagagtgcccagtgtgcaaggccctcgtggaggaggacaagctcgtccccctttatgggcgtggcaaggatcgcgtcgacccgaggtcgaagaacatgcccgagggcgagattcctcaccgcccaactggccagaggcccgccacagccccccgggccgatgctaacagcaactttgccaatgccaatgccaatccatggttcccgggcacaggagtccctctggcaaatgcgcgatgggggaactacgcattctcagctgctttcgggggactgttccctatgcttagcttccaagttcatgggtttccagatgccgccgcttacgcgcagcctgctgggttccactatggatacgggcatgggcatgggcatgggttccaccatggcgggcatatgggacaagcacaagcccatggcgtccaccgacaggcaccgttggggcaacaacagcagcaggcagatatttatctgaaggccctgctcttcatgattgtaattctagtgctcgcaagcctcctcgcgttttaaagcttgtttggcaacgtctcctcgtcatggtttggaaattgtaattctggggagtgctcctcctggcatttcagtgctgttggcatggcagtttgacattgtgatggcgtattggcctatgagaatcgccagaatatttcactgttggatcaaaaaaaaaaaaaaaaaaaaaaaaaaaaaaaaaaaaaaaaaaaaaaagaaaaaaaaaaaaaaaaa

SEQ ID NO: 9848 - protein, 234 aa, Zea mays
  misc_feature: Ceres CLONE ID no. 1561131
  misc_feature: Ceres CDNA ID no. 25446623
  misc_feature (24)..(64): Pfam Name: zf PFAM Desc: Zinc finger
  misc_feature: Homolog of GI Number: 77557173 NR Desc: Zinc finger
  misc_feature: Homolog of GI Number: 34909840 NR Desc: P0403C05.28
  misc_feature: Homolog of GI Number: 53792435 NR Desc: putative RING finger protein
  misc_feature: Homolog of GI Number: 30794130 NR Desc: putative RING zinc finger protein
  misc_feature: Homolog of GI Number: 21553849 NR Desc: putative RING zinc finger protein
  misc_feature: Homolog of GI Number: 68299223 NR Desc: putative zinc finger protein
  misc_feature: Homolog of GI Number: 21618087 NR Desc: putative RING zinc finger protein
  misc_feature: Homolog of GI Number: 21912604 NR Desc: putative ubiquitin ligase
  misc_feature: Homolog of GI Number: 34905296 NR Desc: zinc finger
  misc_feature: Useful for increasing chlorophyll and photosynthetic capacity
  misc_feature: Useful for making ornamental plants with modified leaves
  misc_feature: Useful for making plants with increased biomass and foliage
  misc_feature: Useful for making shorter plants
MSANVGESTSGVSSSDAAGGSFECNICFELPQEPIVTLCGHLFCWPCLYRWLHIHAHSPECPVCKALVEEDKLVPLYGRGKDRVDPRSKNMPEGEIPHRPTGQRPATAPRADANSNFANANANPWFPGTGVPLANARWGNYAFSAAFGGLFPMLSFQVHGFPDAAAYAQPAGFHYGYGHGHGHGFHHGGHMGQAQAHGVHRQAPLGQQQQQADIYLKALLFMIVILVLASLLAF

SEQ ID NO: 9849 - DNA, 1048 bp, Zea mays
  misc_feature: Ceres CLONE ID no. 1561365
  misc_feature: Ceres CDNA ID no. 25446888
  CDS (1)..(1047): REFERENCED BY SEQ ID NO: 9850
agtctctatctctcttcttctccaagtatcattttcagccaagtattttcctctcccgataccccaaccgctcttcttctggttctctcgatccccttcctagggactgctaacaccctacctcacccgcgaccaccgcgtggtgctctacgacctcgtctgcgccggcagcgtcaacccggagcacttcgacttccgccgctacgacacgctggactcgtacgtcgacgacctgctcgccatcctcgacgcgctccgcgtcccgcgctgcgccttcgtcggccactccgtgtccgccatgatcggcatcctcgcctccatccgccgccccgagctcttcgccaagctcgtcctcatcggcgcgtcgcccaggttcctgaacgaccacgactaccacggcgggttcgagctgccggagatccagcaggtgttcgacgcgatggcggccaactactcggcgtgggcgaccgggtacgccccgctggcggttggcgcggacgtgcccgcggcggtgcaggagttcagccgcacgctcttcaacatgcggccggacatctcgctccacgtctgccgcaccgtgttcaacacggacctccgcggcgtgctgggcatggtgcgcgccccctgcgtggtggtgcagaccacccgcgacgtctccgtcccggcctccgtcgccgcctacctcaaggcccacctcggcggccgcaccgccgtcgagttcctccagaccgagggccacctcccgcacctcagcgcccccggcctcctcgcccaggtgctccgccgcgcgctcgcccggtactagcagccggcccggccaggccgcctaccacccacctcatacctgatggtggtcggtgtttttaccacctcgatttaacccctgccgagaccgagaatcaaaaaatggcgcgactcgcgccgtttgctgtgcctgtgcgcgccatgactgtagtacaacttgttctggtagtggtacccgatttcttttcgctttttatgagcagttgcagtgttgcactgctactcctaaaaaaaaaaaaaaaaa

SEQ ID NO: 9850 - protein, 168 aa, Zea mays
  misc_feature: Ceres CLONE ID no. 1561365
  misc_feature: Ceres CDNA ID no. 25446888
  misc_feature: Homolog of GI Number: 50916887 NR Desc: putative hydrolases
  misc_feature: Homolog of GI Number: 24216360 NR Desc: Predicted hydrolases or acyltransferases
  misc_feature: Homolog of GI Number: 45656451 NR Desc: hydrolase
  misc_feature: Homolog of GI Number: 53828585 NR Desc: At3g24420
  misc_feature: Homolog of GI Number: 34912326 NR Desc: P0451D05.26
  misc_feature: Homolog of GI Number: 47026958 NR Desc: esterase/lipase/thioesterase
  misc_feature: Homolog of GI Number: 54025257 NR Desc: putative hydrolase
  misc_feature: Homolog of GI Number: 67988424 NR Desc: Alpha/beta hydrolase fold
  misc_feature: Homolog of GI Number: 13592175 NR Desc: ppg3
MIGILASIRRPELFAKLVLIGASPRFLNDHDYHGGFELPEIQQVFDAMAANYSAWATGYAPLAVGADVPAAVQEFSRTLFNMRPDISLHVCRTVFNTDLRGVLGMVRAPCVVVQTTRDVSVPASVAAYLKAHLGGRTAVEFLQTEGHLPHLSAPGLLAQVLRRALARY

SEQ ID NO: 9851 - DNA, 1708 bp, Zea mays
  misc_feature: Ceres CLONE ID no. 1561407
  misc_feature: Ceres CDNA ID no. 40041471
  CDS (77)..(1393): REFERENCED BY SEQ ID NO: 9852
accctctcctacgctttgttctgggctcttcccgacttcctcctcctgtagagagagaacctagagagaacccgggatggggaacatctgcggcggctgcgggaaggacagggtcgccgaggatttcaggccgtctagcccagggacgacaatgacctccaagacgagcggcagcataaccaccaccagtcagagcaccacggggaagctctcctccgtgggcagcagcttcatggcgtccgccggcagccgcagcaccagcggcggattcgacgagggggccaagtaccccgacggaggccagatcctggaggcgcccaacctccgtaccttcacattcatggagctcaagacggccaccaagaacttcaggctcgacagcgtcctcggcgaaggcgggttcgggacagtctacaaagggtgggtggacgagaagaccatgaccccgaccaggaacggcaccggcatggttgttgccgtcaagaagctcaactcggagagcatgcaggggtacgaggaatggcagtcggagataaattttctaggaaggctctcccatccgaacctagtgaagctcttgggctactgctgggaggacagagaactgcttctcgtgtatgaattcatggccaaagggagcttggaaaaccatctattcaggagaggatgcgccccattgtcttgggaactgaggctgaagatagccatcggcgcagctcgaggactcgcattcttgcatgcatcagaaaagcaagtgatctaccgtgacttcaaggcgtccaacatacttttagatgcgaactataacgctaagctctctgattttggccttgctaaacttgggccgactggtagcaagtcacatatcacaaccagggtgatgggaacgtatggctatgcagctccagagtacgtagcaaccggccatttgtacgtgaagagcgacgtgtacggcttcggcgtggtgatgctggagatgctgtccgggcagcgcgcgctggacccgaaccggccgaacgggcagctgagcctggccgactgggcgaagccgttcctggccgaccgccggaggctggcccggctcatggacccgcggttcgaggggcagtacaactcgaagcaggcgttccaggcggcgcagctgacgctcaactgcctggccggcgagccccgcagccggccgtcgatgaaggaggtggtggagacgctggagcagatcgagtcggtgaagagcagggcgcgggaggcgcgcggcggctcgtcgcgggaccggcaccacggccgcgccggcgcgacgcaccagcggtcgccgcgcgccggtggcgagccgcgcggccgcggtgggtcccgggccgccgccaacggccacgccgccagggccgccgcgcggtgacgcgtccagacgatgacgattcttcatgtaaatggcgttttttttttgcctaatctgtgtgcctctccttctgcttgtggtgtttgtcatggctcacgaggttgttcttgcccaatcattgatgagatgtattattattataagattaattagcagtgaatttgagaagggatgggtgttgttgcaagttgtagccagtagtgcaatgcaatagtagaagaaaggatcaatcatccagaatctgtaattattctaaatcaaattgtattttggaatagagggagtagttatcagagataaagaaaaaaaaaaaaa

SEQ ID NO: 9852 - protein, 438 aa, Zea mays
  misc_feature: Ceres CLONE ID no. 1561407
  misc_feature: Ceres CDNA ID no. 40041471
  misc_feature (355)..(378): Pfam Name: Pkinase_Tyr PFAM Desc: Protein tyrosine kinase
  misc_feature: Homolog of GI Number: 50927967 NR Desc: OSJNBa0017B10.2
  misc_feature: Homolog of GI Number: 42570809 NR Desc: protein kinase
  misc_feature: Homolog of GI Number: 7270511 NR Desc: protein kinase
  misc_feature: Homolog of GI Number: 34906046 NR Desc: putative serine/threonine
  misc_feature: Homolog of GI Number: 42563260 NR Desc: protein kinase
  misc_feature: Homolog of GI Number: 27311943 NR Desc: serine/threonine specific protein kinase
  misc_feature: Homolog of GI Number: 53689728 NR Desc: serine/threonine protein kinase
  misc_feature: Homolog of GI Number: 52627095 NR Desc: At1g69790
  misc_feature: Homolog of GI Number: 79313968 NR Desc: ATP binding / kinase/ protein kinase/ protein serine/threonine kinase/ protein
  misc_feature: Homolog of GI Number: 42565268 NR Desc: protein kinase
  misc_feature: Useful for decreasing plant size
  misc_feature: Useful for making plants with altered leaf shape eg curled leaves
  misc_feature: Useful for making plants with increased biomass and foliage
  misc_feature: Useful for making plants with increased biomass and foliage
  misc_feature: Utility: PEG Useful for making plants with increased tolerance to drought
MGNICGGCGKDRVAEDFRPSSPGTTMTSKTSGSITTTSQSTTGKLSSVGSSFMASAGSRSTSGGFDEGAKYPDGGQILEAPNLRTFTFMELKTATKNFRLDSVLGEGGFGTVYKGWVDEKTMTPTRNGTGMVVAVKKLNSESMQGYEEWQSEINFLGRLSHPNLVKLLGYCWEDRELLLVYEFMAKGSLENHLFRRGCAPLSWELRLKIAIGAARGLAFLHASEKQVIYRDFKASNILLDANYNAKLSDFGLAKLGPTGSKSHITTRVMGTYGYAAPEYVATGHLYVKSDVYGFGVVMLEMLSGQRALDPNRPNGQLSLADWAKPFLADRRRLARLMDPRFEGQYNSKQAFQAAQLTLNCLAGEPRSRPSMKEVVETLEQIESVKSRAREARGGSSRDRHHGRAGATHQRSPRAGGEPRGRGGSRAAANGHAARAAAR

SEQ ID NO: 9853 - DNA, 1098 bp, Zea mays
  misc_feature: Ceres CLONE ID no. 1561410
  misc_feature: Ceres CDNA ID no. 25402830
  CDS (115)..(924): REFERENCED BY SEQ ID NO: 9854
aaactcccccggccgtcctgctcgccggcttctggctggcccctgcatccgcccagtgtgtgtgacctcagggaatcgattcgttcatccaagtgaaggcaaccagactccaggatggagttcaaagccggcgttttcaccgtggcaatgctagccatcgtcgtgctctccacaccagcagccccgcagaagcccaagagccctcccgctccgcgatccccagtcgtcctggcgccggcgccagcgcccgcaccggcggcgccgcaccacgtggacctcgcggacctcctcagcgtggccgggccgttccacacgttcctggactacctgcagaagaccggcgtcatcgagaccttccagagccaggcgaacgacacgaagcggggcggcatcaccgtcttcgtgcccaaggactcggcgttcgcggcgctgaagcagaccacgttcgccaacctcacccaggaccagctcaggtcgctgctgctgtgccacgcgctgcccaagtactactcgctggccgagttcgaccggctgagcgcgctcggcccggtggccaccctcgccggctcgcagtacacgctgaacctcacctacgacatgggcaccgtccgcgtgaagtccatgtggtccgaccccaagatcagcagcagcgtgtactccacccgccccgtcgcggtgtacgaggtcggcaaggttctcctgccgatgcagatcttcaagagcgaccccccgctggcgcctgcccccgctccggcaccggatgccaaggcatccgacgtcgctcccagcccggcgtcggggaaatcatcagcgagtgcgaaggcgaaggagaaggcgggagagaagagctcgtcgtgccgatccggtgtcgtcgcccattacttggcgatcgctgtctccggcggcctggtgctcttgtggtgaggatcgacgagttcgtcctcaccgtgtgtccgtgtcgaaggagcaagtacggggttcagcttagggccccccgtgtttaatttatatatgggtgtttatggattcattcttttggacatatggtaggccatttgtgtttaggactgagctgttgtggaaaaaaaaaaaaaaaaa

SEQ ID NO: 9854 - protein, 269 aa, Zea mays
  misc_feature: Ceres CLONE ID no. 1561410
  misc_feature: Ceres CDNA ID no. 25402830
  misc_feature (64)..(197): Pfam Name: Fasciclin PFAM Desc: Fasciclin domain
  misc_feature: Homolog of GI Number: 50947359 NR Desc: putative arabinogalactan protein
  misc_feature: Homolog of GI Number: 47717927 NR Desc: fasciclin
  misc_feature: Homolog of GI Number: 50924994 NR Desc: OSJNBa0089K21.15
  misc_feature: Homolog of GI Number: 50924992 NR Desc: OSJNBa0089K21.14
  misc_feature: Homolog of GI Number: 2129473 NR Desc: arabinogalactan
  misc_feature: Homolog of GI Number: 47717931 NR Desc: fasciclin
  misc_feature: Homolog of GI Number: 50932235 NR Desc: putative arabinogalactan protein
  misc_feature: Homolog of GI Number: 14190409 NR Desc: AT3g60900/T4C21_310
  misc_feature: Homolog of GI Number: 54145017 NR Desc: arabinogalactan
MEFKAGVFTVAMLAIVVLSTPAAPQKPKSPPAPRSPVVLAPAPAPAPAAPHHVDLADLLSVAGPFHTFLDYLQKTGVIETFQSQANDTKRGGITVFVPKDSAFAALKQTTFANLTQDQLRSLLLCHALPKYYSLAEFDRLSALGPVATLAGSQYTLNLTYDMGTVRVKSMWSDPKISSSVYSTRPVAVYEVGKVLLPMQIFKSDPPLAPAPAPAPDAKASDVAPSPASGKSSASAKAKEKAGEKSSSCRSGVVAHYLAIAVSGGLVLLW

SEQ ID NO: 9855 - DNA, 1660 bp, Zea mays
  misc_feature: Ceres CLONE ID no. 1561459
  misc_feature: Ceres CDNA ID no. 25446973
  CDS (55)..(1386): REFERENCED BY SEQ ID NO: 9856
aacggcgcaaccctacgtccctacctaccttaccgttctgccctcgccttgcccatggagccgcccgcctcctcgccggcaccgccaaaccctaacccagttcccgacgaccggccgctgcagcagcagcaggtggaagaggcgccggcgctggcgccggagccggagcgggagacgtcgccgacgtccctgaccacctcaatcgatcccaccccttccggcggcgaggagagcgagagcgatgactcctcgtcagtctcgtcggcgccctcctccgcctccgctcccgcggccgctgcgcccttccccacggccaaggacctcctccacatctccttcaaccaggactacggctgcttcgcggcgggcaccaagtcgggcttccgcatctacaactgcgaccccttccgcgagatcttccgccgggacctcgccgccgatggcggcggcgccgggggagggggtatcggcgtcgtcgagatgttgttccgctgcaacatactcgcgctcgtcggcggcggcgataacccccactacccgcccaacaaggtgatgatctgggacgaccaccagagccggtgcattggggagctctccttccgctcccccgtccgaggcgtccgcctccggcgcgaccgcatcatcgtggtgctcgagaacaaaatcttcgtctacaactttgcggaccttaagctcgtgcaccagatcgagacggcgcccaaccccaagggcctctgcgctgtgtcgcagcagcccgggtcaatcgtgcttgtttgccccggtgcccagaaggggcaggttagggtggaacactatggggcaaggaagaccaagtttatcaatgcacacacttcccgcgtctcgtgcttcgcgctgtcgcaggacgggaggctcattgcaactgctagcaccaagggaacacttgttagaatctacaatgcagctgaaggcaatctcttgcaggaagtaaggagaggtgctgatagagcagaaatatatagcttggctttctcgaataatttgcagtatttggctgtgtccagtgataaaggaacaatacatgtcttcaatctaaagataaatgtgggatcgactgcaaatgataaacctatacctgctccagatcctgaagtttcgcatataagcccccctctttcgttcattaagggtgtgttgccgaaatatttccactctgagtggtcagtagctcagttcaggctccatgagggggagcagtacattgttgcatttggacatgagaagaataccgtgtcagttgttggtatggatggaagcttctacagatgtcaatttgacccagttaatggaggagaaatgctgcagctggagtgctacagttttctaaaaccgtcagatcaaccgtagcgacacacaattatcatctatcaattgatgccctccccgtaccaagaactgtacagtatctttgtgcgccctcgttggccggaggtctaagctaaatatgataatattttctttgtgtatatatatttcttgttggctctgggtgatgtatgttctgtctgtggaagggctaaaacacccatctgcagatggacgttatagaacgtgtcgttattatttatgaatggattgaataaaatagcctaacaatgtttctgcaaaaaaaaaaaaaaaa

SEQ ID NO: 9856 - protein, 443 aa, Zea mays
  misc_feature: Ceres CLONE ID no. 1561459
  misc_feature: Ceres CDNA ID no. 25446973
  misc_feature (303)..(339): Pfam Name: WD40 PFAM Desc: WD domain
  misc_feature: Homolog of GI Number: 16323362 NR Desc: AT3g62770/F26K9_200
  misc_feature: Homolog of GI Number: 34907164 NR Desc: P0423A12.19
  misc_feature: Homolog of GI Number: 30694449 NR Desc: WD
  misc_feature: Homolog of GI Number: 18412493 NR Desc: transport protein
  misc_feature: Homolog of GI Number: 76645396 NR Desc:  similar to Wdr45 like
  misc_feature: Homolog of GI Number: 62657512 NR Desc:  similar to Wdr45 like
  misc_feature: Homolog of GI Number: 56471321 NR Desc: WD repeat protein
  misc_feature: Homolog of GI Number: 56464602 NR Desc: WD repeat protein
  misc_feature: Homolog of GI Number: 56471751 NR Desc: WD repeat protein
  misc_feature: Homolog of GI Number: 57227372 NR Desc: autophagy
MEPPASSPAPPNPNPVPDDRPLQQQQVEEAPALAPEPERETSPTSLTTSIDPTPSGGEESESDDSSSVSSAPSSASAPAAAAPFPTAKDLLHISFNQDYGCFAAGTKSGFRIYNCDPFREIFRRDLAADGGGAGGGGIGVVEMLFRCNILALVGGGDNPHYPPNKVMIWDDHQSRCIGELSFRSPVRGVRLRRDRIIVVLENKIFVYNFADLKLVHQIETAPNPKGLCAVSQQPGSIVLVCPGAQKGQVRVEHYGARKTKFINAHTSRVSCFALSQDGRLIATASTKGTLVRIYNAAEGNLLQEVRRGADRAEIYSLAFSNNLQYLAVSSDKGTIHVFNLKINVGSTANDKPIPAPDPEVSHISPPLSFIKGVLPKYFHSEWSVAQFRLHEGEQYIVAFGHEKNTVSVVGMDGSFYRCQFDPVNGGEMLQLECYSFLKPSDQP

SEQ ID NO: 9857 - DNA, 1293 bp, Zea mays
  misc_feature: Ceres CLONE ID no. 1561792
  misc_feature: Ceres CDNA ID no. 25402832
  CDS (295)..(1059): REFERENCED BY SEQ ID NO: 9858
agtgtgggagctcacagtcacaaaagaaacgatgtccactggcgaactgacggctccgtcatgcggcgatcgataaaaatgccgcgaggccaccacgcgagacgaacgcaaacgaagtgcggaaaataggcctcttttttcttcttctcgtagagatatttcggaagagggaacgagggcttcgattcgatccaggagtcgcccaaatcgtcttgtcttcgacttcggacacgagatcctctagagggttgtgctgtttggcgtgaggctttaggggcgatttgctttgctcgcatgggggatcatgtcgctgtggatgttggggagctcgttgcgtcccgagtcggtgaggcagcggggctattgtccggcggcaaggaggaaacgaaggcgctggctgggatggtggagtgccgcatttgccaggaggaggacctcgcaaagaacctcgagagcccctgtgcttgcagcggcagcctcaagtatgctcacagggaatgtgtgcaacgttggtgcaatgagaaaggagatataatctgtgaaatctgccatgagtcgtacaagcctggttacactgccccaacccaggtgcatcatgatgaaactaccatagagataagtggtggagattggaccatctctggcaaccgtttggatttacatgatcccagaatattggcaatggctgctgctcaacaccgtttacttgaagacgagtacgatgaatatactgcaacaaacaataacgctgctgtgttttgccgctctatatttctgattttgatggcccttctgctcctgaggcatacattgaccattactaacagtgatgatgaagatgatgcatctgctattttctcgctatttcttttgagagccgctggatttttgctgccatgctatattatggcttgggctattagtatcatgcagcgtcaaagacaaagacaggaagaagcaatgctgttaccaacggaagtggcgatcattctgcacccggacggaagaacaatgcaatttgcggtggcaccagcggaatctcctgcatcacatcagtgacaggctcacaggcctgcctcgggagtgcatagcataacagatgcatctcagcatctggtcttaaaggtggaaacacgaggacgttgtgcaattcatgttgtgccttcgaatttagttaactttcaagcggagattcaatgtttgttcgatgggctctcagcaccttctgtacataaagagatttatctaataactaataagtgaatataagttaaatcaaaaaaaaaaaaaaaa

SEQ ID NO: 9858 - protein, 218 aa, Zea mays
  misc_feature: Ceres CLONE ID no. 1561792
  misc_feature: Ceres CDNA ID no. 25402832
  misc_feature (4)..(49): Pfam Name: zf PFAM Desc: Zinc finger
  misc_feature: Homolog of GI Number: 50909823 NR Desc: zinc finger
  misc_feature: Homolog of GI Number: 77551787 NR Desc: Zinc finger
  misc_feature: Homolog of GI Number: 50946099 NR Desc: zinc finger protein
  misc_feature: Homolog of GI Number: 49533771 NR Desc: putative zinc finger protein
  misc_feature: Homolog of GI Number: 30692888 NR Desc: zinc finger
  misc_feature: Homolog of GI Number: 15223693 NR Desc: zinc finger
  misc_feature: Homolog of GI Number: 21537046 NR Desc: nucleoside triphosphatase
  misc_feature: Homolog of GI Number: 42570667 NR Desc: zinc finger
  misc_feature: Homolog of GI Number: 15217818 NR Desc: zinc finger
MVECRICQEEDLAKNLESPCACSGSLKYAHRECVQRWCNEKGDIICEICHESYKPGYTAPTQVHHDETTIEISGGDWTISGNRLDLHDPRILAMAAAQHRLLEDEYDEYTATNNNAAVFCRSIFLILMALLLLRHTLTITNSDDEDDASAIFSLFLLRAAGFLLPCYIMAWAISIMQRQRQRQEEAMLLPTEVAIILHPDGRTMQFAVAPAESPASHQ

SEQ ID NO: 9859 - DNA, 879 bp, Zea mays
  misc_feature: Ceres CLONE ID no. 1562172
  misc_feature: Ceres CDNA ID no. 40352046
  CDS (6)..(515): REFERENCED BY SEQ ID NO: 9860
actacatgttgtccgcaaccaacaggattcttgtgtgtgattttccatcctcaagtatctcagtcatggagctccccaatggggtggagaacaagcccggtggttgcatcatgctttccaggggagatagttctggaatctttctgatctatgtcaaagagtttcagctacacatcttccaccataggatgggcatcaattatccaagcaactggtccctagtggattctgtttatttgcgtcaggtatgcgccaatcttgatatggcaaggtggccatctgtgaatggacctagtgctggtgttaaattgtgcgcagttggggacaatgcggagtttgtgctcttggagatatttggtactattgtattcttggatattacaagcaggcaagcagagaaggtgtatgagctgacaccagaggataaagagttggtcagtgtccgccccctgatgttgatatggcctcctgttttccctcagttgaaggatgcatattatgacaaaaaagagtgatgcaaaggctcaaaatacagcttcagaggaaccagttcaaagctcaacctgcaggtccaaagatgagaatgagaagcataacaatatcactgaagaggcttcatgatgagcacaccctgttccgaggtggcgaggtgtagtaaaaacgagagagaataaagggaggctagttcatgtaaataactttgaataaaaaatagttgttaaactacttgtttagatcagatcatttgatgtaaataatgatttatcgaaacccgacggcactttctaattattcgtatgccaggctttgctttaaaaaaaaaaaaaaaaaaaaaaaaaaaaaaaaaaaaaaaaaaaaaaaaaaaaaaaaaaaaaaaaa

SEQ ID NO: 9860 - protein, 169 aa, Zea mays
  misc_feature: Ceres CLONE ID no. 1562172
  misc_feature: Ceres CDNA ID no. 40352046
MLSATNRILVCDFPSSSISVMELPNGVENKPGGCIMLSRGDSSGIFLIYVKEFQLHIFHHRMGINYPSNWSLVDSVYLRQVCANLDMARWPSVNGPSAGVKLCAVGDNAEFVLLEIFGTIVFLDITSRQAEKVYELTPEDKELVSVRPLMLIWPPVFPQLKDAYYDKKE

SEQ ID NO: 9861 - DNA, 1477 bp, Zea mays
  misc_feature: Ceres CLONE ID no. 1562264
  misc_feature: Ceres CDNA ID no. 25446892
  CDS (230)..(1300): REFERENCED BY SEQ ID NO: 9862
agaagacggaggacagtagagtcgtcgaagcagctgtacgccggaaggcctacccccgctatactatctgccttcctactcgcttccctccccgagtccccgtcctcctcagctgccttccgccgccgtgcagcacccgcgcagcctccactccggcgtcgtctccctccctcctccgccatcgccaccgggacacgcaaagcttccaggtcttgtctttgggtagaacatgtcgtgctttgcatgctgtggtgatgaagatacacaagtaccagacaccaggactcaatacccaggacatcatccagcaagagccgacgcataccgccctgctgatcaacctcccaagggttcccaacctgtgaaaatgcaaccgattgcagtccctgccattcctgtggatgagcttagggaggtgactaagggttttggtgatgaagccttgattggtgagggctcctttggtagagtatacttaggtgttctaagaaatggcaggagtgccgcggtcaaaaagttggattctaataagcagccagaccaagaattcttggcgcaggtgtctatggtgtcaaggctgaagcacgaaaatgttgttgagttgcttggttactgtgctgatgggacactccgcgtccttgcctacgagtttgctactatgggttcccttcatgatatgcttcatggaaggaaaggtgttaaaggggctcaacccggcccggtcttatcatggttgcagcgtgtgaagatagctgttggggcagcaaaaggcctcgagtatcttcacgagaaggcgcagcctcatatcatgcaccgagacatcaagtctagcaacgttcttcttttcgatgacgacgtagctaagatcgctgacttcgatttgtcaaaccaagctccggacatggcagcccgacttcactcgactagggttcttggaacgttcggataccatgcgcctgagtatgcaatgaccgggcaactcagctccaagagcgatgtatatagttttggagtcgttcttctcgagctattgaccggaaggaaacctgtggaccatacattaccaaggggacagcagagtcttgtgacttgggctaccccaagacttagcgaagacaaggttagacaatgcgttgactcgaggcttggaggggactaccctcctaaagctgttgcgaagtttgcagctgttgccgcgctgtgtgttcagtacgaagcggacttccggccaaacatgagcattgttgtcaaggcgctacagcccctgctgaatgcgcatgcgcgggcgaccaacccttgagaaaaatgctagctcaaaagcttcgcattgctcctctccgccctcttgtatgatagataagtaagatacgagtcgccgatgtcgttcttgcggacacatggctggcagcgtgtgacatttgtgattatttgtcccctgaattgtaaacaagattcttgtaaagaaaaaaaaaaaaaa

SEQ ID NO: 9862 - protein, 356 aa, Zea mays
  misc_feature: Ceres CLONE ID no. 1562264
  misc_feature: Ceres CDNA ID no. 25446892
  misc_feature (67)..(286): Pfam Name: Pkinase PFAM Desc: Protein kinase domain
  misc_feature: Homolog of GI Number: 34365699 NR Desc: At3g62220
  misc_feature: Homolog of GI Number: 3668069 NR Desc: Pto kinase interactor 1
  misc_feature: Homolog of GI Number: 34894710 NR Desc: Putative Pto kinase interactor 1
  misc_feature: Homolog of GI Number: 1586940 NR Desc: Ser/Thr kinase
  misc_feature: Homolog of GI Number: 15221111 NR Desc: serine/threonine protein kinase
  misc_feature: Homolog of GI Number: 30690586 NR Desc: serine/threonine protein kinase
  misc_feature: Homolog of GI Number: 20148447 NR Desc: similar to Pto kinase interactor 1
  misc_feature: Homolog of GI Number: 34894506 NR Desc: OJ1116_C07.16
  misc_feature: Homolog of GI Number: 50931229 NR Desc: putative serine/threonine protein kinase
  misc_feature: Homolog of GI Number: 34907210 NR Desc: putative serine/threonine kinase PBS1 protein
MSCFACCGDEDTQVPDTRTQYPGHHPARADAYRPADQPPKGSQPVKMQPIAVPAIPVDELREVTKGFGDEALIGEGSFGRVYLGVLRNGRSAAVKKLDSNKQPDQEFLAQVSMVSRLKHENVVELLGYCADGTLRVLAYEFATMGSLHDMLHGRKGVKGAQPGPVLSWLQRVKIAVGAAKGLEYLHEKAQPHIMHRDIKSSNVLLFDDDVAKIADFDLSNQAPDMAARLHSTRVLGTFGYHAPEYAMTGQLSSKSDVYSFGVVLLELLTGRKPVDHTLPRGQQSLVTWATPRLSEDKVRQCVDSRLGGDYPPKAVAKFAAVAALCVQYEADFRPNMSIVVKALQPLLNAHARATNP

SEQ ID NO: 9863 - DNA, 1179 bp, Zea mays
  misc_feature: Ceres CLONE ID no. 1562306
  misc_feature: Ceres CDNA ID no. 40352047
  CDS (44)..(1009): REFERENCED BY SEQ ID NO: 9864
atatctcctatctccagcagctcctccagacctccacctctctatggcgcgcctgctcctcttcccatcccaagcgtgcgtcgatcctggccgccacctcctcctccacccgccggtctccaggccccgtgctgtccggtctgggcctcctcccgccgcgccacgccgcaccggggtcgtctctcttcccggccgttgcccaccgcccctttgctggaaccaccatccatttcttccttgcagatcatcaaagagaggatgggtcgtttttgcttcagaaaacgtacaagaaatttcttctcaccttcctcgcaaggatgaaaggagaagtgggaatttgcttctgcgattcagtgcactcccatattgcactatggcttggttgagcactgctcaattagcacaatctagtgttggggaaaagctaaatatggtttatgaggtcggggagctgtttgagctgggaattcagctgtcttatctgctcatacttattggactgcttggagctggtacattttttgttatccgtcaggttcttgttcgtagggagcttgatctttctgccaaagagttgcaagaacaagtgagaagcggtgatgcaagtgctactgagtattttgagcttggagcagtcatgctacggagaaaattttatccagctgctatcaaatatctgcagcaagcaattgacaaatgggacagagacgagcaagatcttgcgcaggtctacaatgccctgggggtcagctacaagcgagagaacaaacttgacaaggcgattcagcagtttcagaaggccgtggagctccagccaggctatgtgacagcttggaacaacctgggtgacgcatatgagcagcagaaggacctgaaatcggctctcaaggccttcgaggaggtcctcctctttgatcccaacaacaaggttgcaaggccacgcgtcgatgacctcaggccgcgcgtgagcatgtacaagggtgtgcctgtaaaatccgaaaagcgatagctattcttttttggtggtaaatcatgcatctgtctagtccccagaatagcggttgtttatttttgaacggtagcatttgtaaacatgatgagatgtgtagtagcattggaaaggtccctgaaaaagggcggatgcaatacgattgatggagctaaaaaaaaaaaaaaaaa

SEQ ID NO: 9864 - protein, 192 aa, Zea mays
  misc_feature: Ceres CLONE ID no. 1562306
  misc_feature: Ceres CDNA ID no. 40352047
  misc_feature (60)..(87): Pfam Name: TPR_2 PFAM Desc: Tetratricopeptide repeat
MVYEVGELFELGIQLSYLLILIGLLGAGTFFVIRQVLVRRELDLSAKELQEQVRSGDASATEYFELGAVMLRRKFYPAAIKYLQQAIDKWDRDEQDLAQVYNALGVSYKRENKLDKAIQQFQKAVELQPGYVTAWNNLGDAYEQQKDLKSALKAFEEVLLFDPNNKVARPRVDDLRPRVSMYKGVPVKSEKR

SEQ ID NO: 9865 - DNA, 1166 bp, Zea mays
  misc_feature: Ceres CLONE ID no. 1562373
  misc_feature: Ceres CDNA ID no. 25402792
  CDS (88)..(765): REFERENCED BY SEQ ID NO: 9866
atccaacaccatcaatccatcatccaggccgcaagaaacgcctcctccggccctccctccctctcgccgtccgccgtcctcctcgccatggctctggactcggttcctccttaccccagcgacctgggctccagcagggccgccaggacccagcagaggatcaggaaagaggagcgcacctggacctcggacacgtacgctccgtacgacgacgggcaccagtggaggaagtacggcgagaagaagctctccaactcccacttcccaaggttctactacagatgcacatacaagaacgacatgaagtgccccgcgacgaagcaagtgcagcagaaggacagcagcgacccgccactgttctccgtcacttacttcaaccagcacacctgcagcagctcaagcgccctcggcagcgccagagacgtcgcgtcccagtcgtcttcaaagaaggcggtgtcgatctgcttcagcccgcacgccccctccgagcagacctcgttcctgacgacgactacggtcgcgccgccggttatgcactcctacggcgccaaccgacagcccgacaggagcgcctacaaccaacagccccagtggtggacaggcggtgtgccatctcccacaagcaacggccctgctaagatggaggtcgcggagtccacgcagaagccgagcggttcgtacggcagcaccaccggcaacgctccgtccaggacgctgctaccgatcggccagtccaggtgcatcgagtacttccatttcttgtgatgagcttccgggaaggcaagctggggctcgggcactgcagcttggtgtctgcttgtttggagtggcaagtggagtttgtatctggagctggaggcgaaggcgaaaatgttgctgccgtcgtcctggcctcctggcctgaactacacaggccgggcggggcccaatcagtatactgactgacctgcattgcattacatacagagactgcctgctgcttactgtactgtacatctttgcatttgggttcaagccacgttttggtgcttggatgatgtgaagaatggtattggactgttggggtttctttatctagcagtagcgtacatgatatgatacgacgtacagaatgactgcttgacagttgagatatatccatttgtttgtcaaaaaaaaaaaaaaaa

SEQ ID NO: 9866 - protein, 225 aa, Zea mays
  misc_feature: Ceres CLONE ID no. 1562373
  misc_feature: Ceres CDNA ID no. 25402792
  misc_feature (40)..(103): Pfam Name: WRKY PFAM Desc: WRKY DNA
  misc_feature: Homolog of GI Number: 77552842 NR Desc: DNA
  misc_feature: Homolog of GI Number: 77552841 NR Desc: DNA
  misc_feature: Homolog of GI Number: 46394346 NR Desc: TPA: WRKY transcription factor 46
  misc_feature: Homolog of GI Number: 77548440 NR Desc: WRKY DNA binding domain
  misc_feature: Homolog of GI Number: 77553498 NR Desc: WRKY DNA binding domain
  misc_feature: Homolog of GI Number: 46394290 NR Desc: TPA: WRKY transcription factor 18
  misc_feature: Homolog of GI Number: 34907796 NR Desc: P0703B11.18
  misc_feature: Homolog of GI Number: 56201706 NR Desc: WRKY transcription factor 18
  misc_feature: Homolog of GI Number: 46394350 NR Desc: TPA: WRKY transcription factor 48
  misc_feature: Homolog of GI Number: 77552845 NR Desc: WRKY DNA binding domain
MALDSVPPYPSDLGSSRAARTQQRIRKEERTWTSDTYAPYDDGHQWRKYGEKKLSNSHFPRFYYRCTYKNDMKCPATKQVQQKDSSDPPLFSVTYFNQHTCSSSSALGSARDVASQSSSKKAVSICFSPHAPSEQTSFLTTTTVAPPVMHSYGANRQPDRSAYNQQPQWWTGGVPSPTSNGPAKMEVAESTQKPSGSYGSTTGNAPSRTLLPIGQSRCIEYFHFL

SEQ ID NO: 9867 - DNA, 1136 bp, Zea mays
  misc_feature: Ceres CLONE ID no. 1562380
  misc_feature: Ceres CDNA ID no. 40352048
  CDS (147)..(836): REFERENCED BY SEQ ID NO: 9868
aatttcacggttcttcgtcaaccgtcatcgctttctccccctcccccgtctcttctccctcgagggaataagcccgccgcgtgaagcttcttcttgcatccgagtgcggaatcacctccaatctgcccctcgggccgccggcgccgatggagaaggtgaagaacatgctcaagccgcggccgacgccgcagcagcagctgcgcgagtggcagcgccgcctccgcaacgagtgccgcgtcctcgaccgtcagatccgagatgtgcagagggaggagaagaacgtggagaaagccatcagggaggctgccaagcgcaatgacatgggatctgcaaaggctcttgctaaggaacttgtaagatcaagacgtgctgttaatcgtctttatgagaacaaggctcaactaaattcagtatcaatgcaccttggagaaattgtcgcaactgcaagaacagtgggtcatctgtccaaaagcactgaagtgatgaaaattgttaacaatctaatgaaagctccagagttggctaccacgatgcaagaatttagcaaagaaatgaccaaggcaggtgtgatggaagagatggtgaacgaggcagttgattcagctttggactctgaggacatggaggaggaaatcgaagaggaggttgacaaggttcttgcttcagtagctggggagactgcctcccagctaccagatgctgccagaacacagaagatacatgaggcttcaacaagcagggttccagaagaacgacaagctgttgcagagggtgctgatgacgacgaggaagacctagaagagatcagggcacggcttgctaaagtgaggtcgtaaatcatatacatatctgagttttctaacctggggagcccatggctcacaaaatatggtgccaaaacccgtgtattgtgaactgagtcgatagcaatgcaatttttttttttaattggccctcgagtcgaccatatatgaagtggcagtctattgttgtacaacgctacgagagtggcatggaatatcggaatatggatagcgaaatgcctctgatttcataaagcgatgtaaaatttattagcaggaaaacaaaacggctggataacagcgcctgccgttgaacaaaaaaaaaaaaaaaaa

SEQ ID NO: 9868 - protein, 229 aa, Zea mays
  misc_feature: Ceres CLONE ID no. 1562380
  misc_feature: Ceres CDNA ID no. 40352048
  misc_feature (20)..(190): Pfam Name: SNF7 PFAM Desc: SNF7
MEKVKNMLKPRPTPQQQLREWQRRLRNECRVLDRQIRDVQREEKNVEKAIREAAKRNDMGSAKALAKELVRSRRAVNRLYENKAQLNSVSMHLGEIVATARTVGHLSKSTEVMKIVNNLMKAPELATTMQEFSKEMTKAGVMEEMVNEAVDSALDSEDMEEEIEEEVDKVLASVAGETASQLPDAARTQKIHEASTSRVPEERQAVAEGADDDEEDLEEIRARLAKVRS

SEQ ID NO: 9869 - DNA, 969 bp, Zea mays
  misc_feature: Ceres CLONE ID no. 1562609
  misc_feature: Ceres CDNA ID no. 40352049
  CDS (164)..(754): REFERENCED BY SEQ ID NO: 9870
aggagacggtagacggaggagctagcttgccaattgccattgcactgcgcgcgcgcacctcacatccgccgccagcaggtgccaccgccatctctgctttctctctctctctctctctctctctctctctctctctcaagcaacgcccgcctgcccgcccgccatggcgaccatagccacgatggccctgctgaagcccgccaggatcgtggcgcggtcggcgccgccgtccaccagcggcagcgtctcgctgcgcgtcccggcgcgggccaagaaggccgcggtgtccgcgtccgtgtcgtccgcgctggcgggcgccttcttctcggcgctggcgtcgtcggacgcggcgctggcggcgcagcgcgtggcggacgtcgcggcggcggccgacgccgggagcgacaaccgcgggcagctgctgctcttcgtggtggcgcccgccatcgggtgggtgctctacaacatcctgcagccggcgctgaaccagctcaaccgcatgcgcagccaggccgtggtcgccggcctgggcctcggcgccgccgccgccgggatggcggccgcgcccgaggcctccgccgccgccgcggcgcaggacctcgccgctctcgccgctgctgcggctgcggccgcgcccgccgacgacaaccgggggctcctgctgctcatcgtcgtcacgcccgccatcggctgggtgctcttcaacatcctccagccggcgctcaaccagatcaaccgcatgaagtccgactgagctgctagctggcaacaacaccggggacggcggagtgtgcgtatcagcggctggacggttgtaatttatagcgtgaagcatggttatgtaataggtctgttctccagagtagatgtgccatgcttttgtgtcatcaccgaaagtgccttatgagtgatccttggcctattattcaaaaaaaaaaaaaaaaaaaaaaaaaaaaaaaaaaaaaaaaa

SEQ ID NO: 9870 - protein, 196 aa, Zea mays
  misc_feature: Ceres CLONE ID no. 1562609
  misc_feature: Ceres CDNA ID no. 40352049
  misc_feature (167)..(195): Pfam Name: PsbY PFAM Desc: Photosystem II protein Y
MATIATMALLKPARIVARSAPPSTSGSVSLRVPARAKKAAVSASVSSALAGAFFSALASSDAALAAQRVADVAAAADAGSDNRGQLLLFVVAPAIGWVLYNILQPALNQLNRMRSQAVVAGLGLGAAAAGMAAAPEASAAAAAQDLAALAAAAAAAAPADDNRGLLLLIVVTPAIGWVLFNILQPALNQINRMKSD

SEQ ID NO: 9871 - DNA, 1295 bp, Zea mays
  misc_feature: Ceres CLONE ID no. 1562907
  misc_feature: Ceres CDNA ID no. 36691159
  CDS (89)..(1135): REFERENCED BY SEQ ID NO: 9872
aaaaaaaaaaaaaaaaaaatagtcccaggaaactaatttcaacacacaactggacgacggtgcgttgcgttggtggccgccggcgacgatgtcgtcgtccgcgggcgacaagaggaagaagacggcgtgcgtgaccggagggaacgggtacatcggctccgcgctcatcaagatgctgctggaggacggatacgccgtcaagacgacggtcaggaacccagacgacatggacaagaactcccacctcaagggcctgcagcagctcgggccgctgacggtcctccgcggcgacatggacgaggagggcagcttcgacgacgccgtcgccggctgcgactacgtcttcctcgtcgccgcaccggtgaacctcgcagcacaggatccagagaaagagcagatcgagccgtccgtccgaggcacgctgaacgcgatgaggtcgtgcgcgaaggccgggacggtgcggcgcgtgatcctgacctcgtcggtggccggagtctacatcaggccggacctgctgcaactgcgaggcgacgggcacgtgctggacgaggagtcctggtccgacgtcgagtacctcagagccaacaggccaccgacctgggggtactgcgtgtcgaaggtgctcctcgagaaggaggcgtgcaggttcgcgggcgagcacggcatcagcctggtcaccgtctgccccgtcatcaccgtgggcgcggcgccggcgcccaaggtccgcacgagcatcatcgacagcctctccatgctgtccggcgacgagcgagggctcgccgtgctcaaaggcatcgagaagacctccggcgcggtgcagctggtccacgtcgacgacctctgccgcgccgagctgttcctggcagaggcggcggcggccgacgggaggtacatctgctgcggcctcaacacgaccgtcctcgagctcgcgcgtttcctggcacacaagtacccgcagtacggcgtgaaaacaaacctccacgacgatgaacagcagctactcgagaagccgagggtgaaggtgtcgtcggagaagctcgtccgggaagggtttgagtacaggcacaacacgctggacgagatctacgacaatgtggtcgagtacggcaaggcgttagggattctgccctactgatacttagatgcccgagcttaattaagtaggagggcagcatatatgttgtcggacatatacgagtcttggaaagtacttaaataatttatggacatatttttcattggaaaaaaaaaaaaaaaaaaaaaaaaaaaaaaaaaaaaaaaaaaaaaaaaaaaaa

SEQ ID NO: 9872 - protein, 348 aa, Zea mays
  misc_feature: Ceres CLONE ID no. 1562907
  misc_feature: Ceres CDNA ID no. 36691159
  misc_feature (15)..(41): Pfam Name: NAD_binding_4 PFAM Desc: Male sterility protein
  misc_feature (244)..(271): Pfam Name: Epimerase PFAM Desc: NAD dependent epimerase/dehydratase family
  misc_feature: Homolog of GI Number: 21741071 NR Desc: OSJNBb0015D13.4
  misc_feature: Homolog of GI Number: 21741066 NR Desc: OSJNBb0015D13.10
  misc_feature: Homolog of GI Number: 50928939 NR Desc: OSJNBa0089N06.19
  misc_feature: Homolog of GI Number: 32492151 NR Desc: OSJNBb0015D13.3
  misc_feature: Homolog of GI Number: 50928945 NR Desc: OSJNBa0089N06.22
  misc_feature: Homolog of GI Number: 32492150 NR Desc: OSJNBb0015D13.1
  misc_feature: Homolog of GI Number: 50928943 NR Desc: OSJNBa0089N06.21
  misc_feature: Homolog of GI Number: 73655645 NR Desc: anthocyanidin reductase
  misc_feature: Homolog of GI Number: 70997800 NR Desc: anthocyanidin reductase
  misc_feature: Homolog of GI Number: 59938849 NR Desc: putative anthocyanidin reductase
MSSSAGDKRKKTACVTGGNGYIGSALIKMLLEDGYAVKTTVRNPDDMDKNSHLKGLQQLGPLTVLRGDMDEEGSFDDAVAGCDYVFLVAAPVNLAAQDPEKEQIEPSVRGTLNAMRSCAKAGTVRRVILTSSVAGVYIRPDLLQLRGDGHVLDEESWSDVEYLRANRPPTWGYCVSKVLLEKEACRFAGEHGISLVTVCPVITVGAAPAPKVRTSIIDSLSMLSGDERGLAVLKGIEKTSGAVQLVHVDDLCRAELFLAEAAAADGRYICCGLNTTVLELARFLAHKYPQYGVKTNLHDDEQQLLEKPRVKVSSEKLVREGFEYRHNTLDEIYDNVVEYGKALGILPY

SEQ ID NO: 9873 - DNA, 992 bp, Zea mays
  misc_feature: Ceres CLONE ID no. 1563078
  misc_feature: Ceres CDNA ID no. 25446564
  CDS (37)..(654): REFERENCED BY SEQ ID NO: 9874
atattgaaaccatcgaagacacctcctcgtgttgctatgactggtgatgttctgcgcctgaaagactcaaaggttccaattattgccgatagcctgaagcaaactattctgaaggaacatgaagctgctagtaaagctagttatggagtgtcagcaatactgtcttcggcaggtgctacctgcaggtcccggagtgagggcctccttagtctactcagtgaggagagctcttacaacatcttaaaatttgacataggttcctgtgtctacatagacttcaatgggagcagccataatattgaattggacagctttgaagcaccaaaagcagatctgctaatgccattctctgcgaagcttgtggatggtatcaaccaaaatgactctaggaggagggcactggtgatgttctgttttgcgtattttaatgtgatagcaagaagcgctgtcatgctttccattgaccaccatggttttgatgtcctcgccaaagtgcctcaaggagacatccttactaatccacaataccactggaaggagttcaggttcacattcaaggaacctgccaaggatgctgaggacttctgccgcatgctggttgggttagaggaagagggtttgcagaccgtgaagagctgtagcggttacggttgacaacccacttgcaaggttcacattcaaggaaccagccaaggatgctgaggactctgccgcatgctggttcgattagagggattttgcagcgcgtgaagagctatagcggtctaggtgacagctcacttgccacaaaaccagtgagaaactatatatccgttattttggaactttgaaatatggttttagattgctatgttttattcgaagatctatggcttctcgaatttaatagagtagatgatgtttgaacatggagccgtaaactatcaatatctgtttgaatggtatttatataaataataaaacgtggtaacggtcaaaaaaaaaaaaaaaaa

SEQ ID NO: 9874 - protein, 205 aa, Zea mays
  misc_feature: Ceres CLONE ID no. 1563078
  misc_feature: Ceres CDNA ID no. 25446564
MTGDVLRLKDSKVPIIADSLKQTILKEHEAASKASYGVSAILSSAGATCRSRSEGLLSLLSEESSYNILKFDIGSCVYIDFNGSSHNIELDSFEAPKADLLMPFSAKLVDGINQNDSRRRALVMFCFAYFNVIARSAVMLSIDHHGFDVLAKVPQGDILTNPQYHWKEFRFTFKEPAKDAEDFCRMLVGLEEEGLQTVKSCSGYG

SEQ ID NO: 9875 - DNA, 942 bp, Zea mays
  misc_feature: Ceres CLONE ID no. 1563113
  misc_feature: Ceres CDNA ID no. 25445907
  CDS (330)..(692): REFERENCED BY SEQ ID NO: 9876
aaaccaacccctatccgccccccgtcttttcccttttctctaccctctatctacccaccgttcccgtctctccgccgcttccttggaagacgaagaaaccctcctccaccaccaacccgatccagctacatccgttgaggcccgtgcgtttcttccctgttctcccatcaatcgacctagccttacgccgaccaggggcttcctctaatcgatctggtgtctgttctgtggtattggtctgggtgcactccagggccaggagcagctagccgtcttcgttcgatccgttcgcaccccccaacgcggttcgatttgcaggaaggagcgtgatggccaagacgagctcgttcaagctggagcaccccctcgagaagaggcaatctgaggctaaccgtatcagagagaagtaccctgacagaattccagtgattgttgagaaggctgagaggagtgatattcctgacatcgacaagaaaaagtacctcgtccctgcagatcttacagtcgggcaattcgtgtatgttgttaggaagagaatcaagctcagtgctgagaaggctatcttcatatttgtgaaaaacacccttccaccaacagctgctctgatgtcttcaatctatgaagagaacaaggacgaggatgggttcctctacatgacttacagtggtgagaacaccttcggactgctctagatggcccgcaatggggtcgccttgcccttgcccatgcctcctgtaaataagacctgccaagcaactgtgtatattctggtttcgtcgtcgcaagtggttgcgctctactgctaaggcctacctatcagttgtggagttgtcgtcgatgttatggacacacttaatcaagtttattaattgactggacctgaatcttgggtcagtaatgtgacatctcctatgtcgtttacggttaaaaaaaaaaaaaaaa

SEQ ID NO: 9876 - protein, 120 aa, Zea mays; identical to SEQ ID NO: 176
  misc_feature: Ceres CLONE ID no. 1563113
  misc_feature: Ceres CDNA ID no. 25445907
  misc_feature (15)..(118): Pfam Name: MAP1_LC3 PFAM Desc: Microtubule associated protein 1A/1B
  misc_feature: Homolog of GI Number: 50941899 NR Desc: putative microtubial binding protein
  misc_feature: Homolog of GI Number: 50928837 NR Desc: OSJNBa0053K19.12
  misc_feature: Homolog of GI Number: 34595981 NR Desc: microtubule
  misc_feature: Homolog of GI Number: 50937683 NR Desc: putative microtubule associated protein
  misc_feature: Homolog of GI Number: 21592920 NR Desc: putative microtubule
  misc_feature: Homolog of GI Number: 30102824 NR Desc: At4g21980
  misc_feature: Homolog of GI Number: 4581162 NR Desc: putative microtubule
  misc_feature: Homolog of GI Number: 21553487 NR Desc: symbiosis
  misc_feature: Homolog of GI Number: 32401365 NR Desc: autophagy
  misc_feature: Homolog of GI Number: 2072023 NR Desc: symbiosis
  misc_feature: Useful for accelerating flowering time
  misc_feature: Useful for making ornamental plants with modified flowers
  misc_feature: Useful for making plants with increased biomass and foliage
  misc_feature: Useful for making shorter plants
  misc_feature: Useful for making shorter plants and plants with modified flowers
  misc_feature: Useful for making smaller plants
  misc_feature: Useful for modifying plant structure
  misc_feature: Useful for sterility

SEQ ID NO: 9877 - DNA, 979 bp, Zea mays
  misc_feature: Ceres CLONE ID no. 1563178
  misc_feature: Ceres CDNA ID no. 25446584
  CDS (379)..(735): REFERENCED BY SEQ ID NO: 9878
agtctctccccacagggaaccgccgcccgtcgcctccagatacgtgcctccggcggaaaatcggtatcgagctcgctttgttcgagtgagtaacgcgcagcgactcctctcccaaccagattttgatggatttcgggcacgcgtggcacaggcacggatatgttagcggatcgggcggccggatcaccgccggcttgcccctctcctcatgattgggcgcgctcatatccctctttttttttttctgcgcacggagactaggttggctctccgtaggcttcccagatcctctccatcctgacctctttctctttgtgcagatcttctgtataaccagcaaggaggcctctccatctcctccgggaaggctgtgcagcaatggagaagtataacagcaagactcagttagcacccttgagagataccccatttgctctccgtggtgctcttggtagttcaagctcataccttgagcaagccaggggctacacgtcttcccctctagcagctctgcgaccaaagatgtcttctactactggaaatcgactcctgcactcgagttgccccctgtcatctcctgtagcaaaccgcccgctgtcgccccaccttcctctgaagaagccacagttcagcgcgactttctcaatctcgcatcgtatattcggtgtcgcgttgggagttgccatcgtatctgtccctctcgccaccaagttcagcctaatgtttggtgtctgagagcgatttgctgcgtctcaagagaaccatcattttccgtttctgtgtctgtttttcatcgtctcggttaccttgcgacacaactgtaggtgccgttggaataatatctttgccatgcttgcagacttgtgtaataagtaaataaacctataaaataccagtttaactgtttgaggagatttgcctcattatggatatacatgctatgaaagtcgattgtcatcgctaaaaaaaaaaaaaaaaa

SEQ ID NO: 9878 - protein, 118 aa, Zea mays; identical to SEQ ID NO: 6636
  misc_feature: Ceres CLONE ID no. 1563178
  misc_feature: Ceres CDNA ID no. 25446584
  misc_feature (67)..(117): Pfam Name: Sdh_cyt PFAM Desc: Succinate dehydrogenase cytochrome b subunit
  misc_feature: Homolog of GI Number: 50937817 NR Desc: succinate dehydrogenase subunit 3
  misc_feature: Homolog of GI Number: 50904863 NR Desc: succinate dehydrogenase subunit 3
  misc_feature: Homolog of GI Number: 32400816 NR Desc: succinate dehydrogenase subunit 3

SEQ ID NO: 9879 - DNA, 900 bp, Zea mays
  misc_feature: Ceres CLONE ID no. 1563206
  misc_feature: Ceres CDNA ID no. 25445979
  CDS (104)..(748): REFERENCED BY SEQ ID NO: 9880
atcctccgcggtgccagtcactcagtcagcctctgcgagcatccaacgccgaccaaccaccaccacaagttcaccgctaccaccactgcacggagtcacggcgatgacgccgcctcaccaccccgtaaacttcgccgtccttctcctcttcctatgcctcccggcagtcccacccgccgccgccgcggccgacccgaccccgaccccatggcccccgcagttccacgcgacgctggtgatggactaccacggcaacatgtccgtggccgacctctggtacgactggccgggcggccgcaacctgcacgtcatccgctaccagctcgccgccgacgcgccatactacgacaacgagtggaacaacggcacctccttcttctacacgccggcgctccgcacctgccgctccgccgccgtcggggtcggcatcctccgcccggactggctccgccccggggccgtctacctcggccgccgcgacgccggcggattcgactgccacgtctgggccaaggccgacttcatcacctactacgaggacgtcaacaccaagcgacccgtcaagtgggtcttctacacaggtaggaccgcctacgttatgagctttgaggtgggagcggtgctggaggacgcggcgtggcaggccccggagtactgcttcaccaacaacggtgggcttgggctggccgacgagaccaccaccaccatcgctggcggcagcagcttcgtccccaggagcgtgctgtgaggtccccacgagcggcagcagcttcagtatttggagaaatacgatcgatatgtgcacagcgtacgcgcagtaatgtatgtaatcttttgcctgtctgttgtttatctctgagcgaaacgtgtggcttttgtggtgccaaaaaaaaaaaaaaa

SEQ ID NO: 9880 - protein, 214 aa, Zea mays
  misc_feature: Ceres CLONE ID no. 1563206
  misc_feature: Ceres CDNA ID no. 25445979
  misc_feature: Homolog of GI Number: 67987177 NR Desc: 4Fe
  misc_feature: Homolog of GI Number: 450903 NR Desc: glue protein
  misc_feature: Homolog of GI Number: 56283929 NR Desc: CG3047
  misc_feature: Homolog of GI Number: 17384258 NR Desc: mucin 5
  misc_feature: Homolog of GI Number: 46226738 NR Desc: uncharacterized secreted protein with thr rich regions
  misc_feature: Homolog of GI Number: 188874 NR Desc: intestinal mucin
  misc_feature: Homolog of GI Number: 58391471 NR Desc: ENSANGP00000020885
  misc_feature: Homolog of GI Number: 188864 NR Desc: mucin
  misc_feature: Homolog of GI Number: 46397621 NR Desc: Mucin 5AC
MTPPHHPVNFAVLLLFLCLPAVPPAAAAADPTPTPWPPQFHATLVMDYHGNMSVADLWYDWPGGRNLHVIRYQLAADAPYYDNEWNNGTSFFYTPALRTCRSAAVGVGILRPDWLRPGAVYLGRRDAGGFDCHVWAKADFITYYEDVNTKRPVKWVFYTGRTAYVMSFEVGAVLEDAAWQAPEYCFTNNGGLGLADETTTTIAGGSSFVPRSVL

SEQ ID NO: 9881 - DNA, 1022 bp, Zea mays
  misc_feature: Ceres CLONE ID no. 1563332
  misc_feature: Ceres CDNA ID no. 36691107
  CDS (248)..(814): REFERENCED BY SEQ ID NO: 9882
actccctttctcttctccccttgtgtcgcgctcgcgcatctgaagcaagggggggaagggccaagggggatcggtcttgttctcggagagggttgagctgcttgacggttttgactcggatcatggtgtgcagctctatcagatagagagctgacgtgaggtgtgagacgcggatcgtggagtactactcagtaggagatcaagaggaaggaggtggggagggggaagaaggcgatagccggggaggatggtgcttgtgcttgcgctgggggatctgcacatcccgcaccgggcgcccgacctccccgccaaattcaagtccatgctcgtgcccggcaagatccaacacatcatctgcactggcaatctctgcatcaaggaagtccatgactacctgaaaagcctttgccctgatctccatattaccagaggtgaacatgatgaggatgctcgatacccagagactaagacacttacaattggtcagtttaagcttgggctgtgccatggccatcaggttgttccatggggcgacctggactccctggcgatgctccagcggcagctggacgtggacatcctggtgaccgggcacacgcaccagttcaaggcatataagcacgagggaggcgtggtgatcaaccctggctctgccacgggcgcctacagcagcatcacttacgacgtgaacccaagctttgtgctgatggacatcgacgggctccgtgtggtggtgtacgtctacgagctgattgacggcgaggtgaaggtggacaaaatcgacttcaagaagactgcgacgatgcacggctagccctatccttccactccgtgattgagtgcaagacatgtctagcttctgtttcttttctttcagcttcttgattcagagcctcctgaacacgctttctacctgttcatgcgcaaagaactttttaggtctggttgttaacaatgtttctcggagccatgaatttaaatactatactttttaattgtcatggtaaaaaaaaaaaaaaaaa

SEQ ID NO: 9882 - protein, 188 aa, Zea mays
  misc_feature: Ceres CLONE ID no. 1563332
  misc_feature: Ceres CDNA ID no. 36691107
  misc_feature (2)..(120): Pfam Name: Metallophos PFAM Desc: Calcineurin
  misc_feature: Homolog of GI Number: 50251955 NR Desc: putative vacuolar protein sorting
  misc_feature: Homolog of GI Number: 42572607 NR Desc: calcineurin
  misc_feature: Homolog of GI Number: 72145926 NR Desc:  similar to Vacuolar protein sorting 29
  misc_feature: Homolog of GI Number: 68396828 NR Desc:  similar to Vacuolar protein sorting 29 isoform 2
  misc_feature: Homolog of GI Number: 68396831 NR Desc:  similar to vacuolar protein sorting 29 isoform 1
  misc_feature: Homolog of GI Number: 71042155 NR Desc: Chain B
  misc_feature: Homolog of GI Number: 9790285 NR Desc: vacuolar protein sorting 29
  misc_feature: Homolog of GI Number: 7706441 NR Desc: vacuolar protein sorting 29 isoform 1
  misc_feature: Homolog of GI Number: 77454964 NR Desc: CG4764
  misc_feature: Homolog of GI Number: 11359333 NR Desc: vacuolar sorting protein Vps29 homolog
MVLVLALGDLHIPHRAPDLPAKFKSMLVPGKIQHIICTGNLCIKEVHDYLKSLCPDLHITRGEHDEDARYPETKTLTIGQFKLGLCHGHQVVPWGDLDSLAMLQRQLDVDILVTGHTHQFKAYKHEGGVVINPGSATGAYSSITYDVNPSFVLMDIDGLRVVVYVYELIDGEVKVDKIDFKKTATMHG

SEQ ID NO: 9883 - DNA, 885 bp, Zea mays
  misc_feature: Ceres CLONE ID no. 1563607
  misc_feature: Ceres CDNA ID no. 25445980
  CDS (141)..(587): REFERENCED BY SEQ ID NO: 9884
aagcctgaaccttgaagcgccccgtagtgcagtgcagcagtgtgctacctcctcagtcctctcactccatcgcaaacgctagtcttcctctaaagagatctttggcaacgaccgacagctcggagcgagtctcagaagcgatggcggcgtccaagaggctgctgctggcggcgctgtgcgtggtggcggcggcgctgctcgccgtgcggtcggagtcccacggcctggaggacttcgcaagcagcgacgcgacgccggagatgcagaccttcttcaagcccgaggccgcggcgctcccggaggccctggacgcgtcctccatgcccgccgccaccatggccgcgaagccggaggccacgtcgatcccgaccaccaccggcaccacgacggcggcggcggcggcgggcacctccgccgcggcaggcactactactgcgtcgtcgccgccgcgcaggtccgtgtccgtggccgccggcgtggcctgcggcgtggctgccgtggccgtggtcggcatcgcggccgccgtggcgtacgtggtgcgcggcaggcgcagcagggaggtgcagctcggcggctcctccccgtgagcacgacccagcgccccggcccgcttgacaggccgtcgtcgccattaggatctggttaagcgcgtcgtctagctctgcgatttgtgtggcttttgggttagtggttgaattcttttttcgcgtggggttgtcggtgaagatctcgctaccgggtacggaccagcagtggtgcatgtaacataaataacgctggtggtattagcgtcattgttgttgtggggtgtatggtgtctagacctttgctatatattttgatttcaggattttgcaaaaaaaaagaaaaaaaaaaaaaaaaaaa

SEQ ID NO: 9884 - protein, 148 aa, Zea mays
  misc_feature: Ceres CLONE ID no. 1563607
  misc_feature: Ceres CDNA ID no. 25445980
  misc_feature: Homolog of GI Number: 50928779 NR Desc: OSJNBa0058K23.15
  misc_feature: Homolog of GI Number: 34872074 NR Desc: similar to Ser/Arg
  misc_feature: Homolog of GI Number: 66780099 NR Desc: PE
  misc_feature: Homolog of GI Number: 61826057 NR Desc:  similar to serine\/arginine repetitive matrix 1
  misc_feature: Homolog of GI Number: 33150824 NR Desc: Ser/Arg
  misc_feature: Homolog of GI Number: 55586489 NR Desc:  similar to Ser/Arg
  misc_feature: Homolog of GI Number: 23274133 NR Desc: Serine/arginine repetitive matrix 1
  misc_feature: Homolog of GI Number: 42542379 NR Desc: serine/arginine repetitive matrix 1
  misc_feature: Homolog of GI Number: 66776813 NR Desc: Phosphoribosylaminoimidazole
  misc_feature: Homolog of GI Number: 55665385 NR Desc: serine\/arginine repetitive matrix 1
MAASKRLLLAALCVVAAALLAVRSESHGLEDFASSDATPEMQTFFKPEAAALPEALDASSMPAATMAAKPEATSIPTTTGTTTAAAAAGTSAAAGTTTASSPPRRSVSVAAGVACGVAAVAVVGIAAAVAYVVRGRRSREVQLGGSSP

SEQ ID NO: 9885 - DNA, 1697 bp, Zea mays
  misc_feature: Ceres CLONE ID no. 1563627
  misc_feature: Ceres CDNA ID no. 25446974
  CDS (241)..(1416): REFERENCED BY SEQ ID NO: 9886
aaggagcccggtgccacatttactcactcactccccaatccacccaccaaccaacccagaacctctctacattcctcttcctcctctatagtctatatacacacaccaagagcaggctgcagcaggctcacgccgcaacctagctagcctgcacgcactctcactgaccacgaccagcgctcagccttctgctccggaagctagctctccggccagccaccccaccccgtccacccgacaatggcggccgccgtggccctcctcctgctctccgccctcggcggagcggcggcgcaggtgttccctccgtggaacggcacgttcccgatggggcccgggttcggaggcgggagcagcagcggcggcgcggccgcgggcgcgggcgcggggacgggcgtgccggcgatgttcgtgttcggggactcgctgacggacaacggcaacaacaacgacctgaactcgctcgccaaggctaactacccgccctacggcatcgacttcgccggcggccccaccggccgcttctccaacggctacaccatggtcgacgagatcgctcagctgctgggcctgccgctgctgccgtcgcacacggacgcggcgtcgagcggcggcggcgacgcggcgctgcacggcgtgaactacgcgtcggcggcggcggggatcctggacaacacggggcagaacttcgtggggcgcatcccgttcaaccagcagatcaagaacttcgagcagacgctggagcagctgcggcgccggacgacgacgacgaggccgggcgcgggcgcgggcgggctggcgcggagcatcttctacgtgggcatgggcagcaacgactacctcaacaactacctcatgcccaactacaacacccgcaacgagtacaacggcgaccagtactccacgctgctggtgcgccagtacgccaggcagctcgacgcgctctacggcctgggcgcccgcaggttcgtcatcgccggggtgggctccatggcctgcatccccaacatgcgcgcgcggagccccgtcaacatgtgctcgcccgacgtcgacgacctcatcatccctttcaacaccaaggtcaaggccatggtgaccagcctcaacgccaaccgcccggacgccaagttcatctacgtcgacaactacgccatgatctcccagatcctaagcaacccgtggtcctacgggttcagcgtggccgaccgcggctgctgcggcatcgggaggaaccggggcatgatcacctgcctgcccttcctgcgcccgtgcctcaaccgcaactcctacatcttctgggacgccttccacccgacggagagggtcaacgtgctcctcggcagggccgccttcagtggcggcaacgacgtcgtctaccccatgaacatccagcagctcgccgcatggcagccgtgactcagtgcaaagctatcgatcgatcgatgcgtcgttttgtagcgctacttactgctatagcgtgtgtgtgtggtcatgagtaggagggagctgagcggagagttatggtacggtgtgtatccgaccagtctcctgttgtttggggggtcaacatcgtgtctcttttgtttttggttcatcatatcagttagttatctatcagtgtttgttcgcttattacctgtactgcatcacggagataagtggagttctatattgggtttttaaaaaaaaaaaaaaaa

SEQ ID NO: 9886 - protein, 291 aa, Zea mays
  misc_feature: Ceres CLONE ID no. 1563627
  misc_feature: Ceres CDNA ID no. 25446974
  misc_feature (2)..(270): Pfam Name: Lipase_GDSL PFAM Desc: GDSL
  misc_feature: Homolog of GI Number: 51964624 NR Desc: PREDICTED P0498H04.26 gene product
  misc_feature: Homolog of GI Number: 7239493 NR Desc: Strong similarity to the putative GDSL
  misc_feature: Homolog of GI Number: 42563144 NR Desc: GDSL
  misc_feature: Homolog of GI Number: 28950931 NR Desc: At1g71250
  misc_feature: Homolog of GI Number: 21592417 NR Desc: lipase/hydrolase
  misc_feature: Homolog of GI Number: 18086455 NR Desc: At1g29670/F15D2_22
  misc_feature: Homolog of GI Number: 34909504 NR Desc: putative GDSL
  misc_feature: Homolog of GI Number: 20453403 NR Desc: AT5g45670/MRA19_6
  misc_feature: Homolog of GI Number: 21553940 NR Desc: GDSL
  misc_feature: Homolog of GI Number: 18413404 NR Desc: GDSL
  misc_feature: Useful for making stronger plants
  misc_feature: Utility: Mannitol Useful for making plants with enhanced tolerance to drought
MVDEIAQLLGLPLLPSHTDAASSGGGDAALHGVNYASAAAGILDNTGQNFVGRIPFNQQIKNFEQTLEQLRRRTTTTRPGAGAGGLARSIFYVGMGSNDYLNNYLMPNYNTRNEYNGDQYSTLLVRQYARQLDALYGLGARRFVIAGVGSMACIPNMRARSPVNMCSPDVDDLIIPFNTKVKAMVTSLNANRPDAKFIYVDNYAMISQILSNPWSYGFSVADRGCCGIGRNRGMITCLPFLRPCLNRNSYIFWDAFHPTERVNVLLGRAAFSGGNDVVYPMNIQQLAAWQP

SEQ ID NO: 9887 - DNA, 1292 bp, Zea mays
  misc_feature: Ceres CLONE ID no. 1563630
  misc_feature: Ceres CDNA ID no. 25446752
  CDS (52)..(1188): REFERENCED BY SEQ ID NO: 9888
aaacagacaacggcacatcatcttccctggttgcggctgcacagggactcgatggcgtcctcctccctcccggcgcccgcggccggccgcgccgagctcctcaaggccttcgacgacgcccgcacgggcgtgcgaggcctcgtggagtcgggcgtctcgtccgtcccggagctcttccgccacgcggacccctacgcctccatcccgctcgccccgcccggcgtttccatccccgtcgtagacctctccctcccgccccacctcgccgccgcggccgccgcggccgccgcccgcacctggggcttcttccacctcgtcaaccaccaccacgccctccccgcggccgccgccgcggccgccgccgccgacgactaccccgagcgcgccttcgcggcggtgcgcgccttcaacgaactccccgcacgcgagcgcgcgccgcacttcagccgcgccgtggacggcggggtcaactactcttccaacgtcgacctgtacaactcccccgcggccagctggcgcgacaccatccagatcctgctgggccccaaccgccacccggacctcgccgaccggatcccggccgcctgccgcgccgaggtgctcgagtgggaggtccgcgccaccgccgtcgcccgcgccttgctcaggctcctctcccaggggctcggcctccgccccgaggcgctggaggacgcgtcctgcgccgacgggaagctcatggtgtgccactactacccgcactgccccgagccggagcggaccatgggcatcgtcccgcacacggaccccggcgtgctcaccgtgctcgcgcaggacggggtcgggggcctgcaggtgaagcaccaggatgaggacggcaaaatctcctgggtggatgtgaagcccgtgcccggagcgctcgtcatcaacgtcggggacctcttgcagataatgtctaatgacaagtacacgagcgtcgagcatcgggtggtcatgaacacacgtgaagaacccagggtttccatcggcatcttcttcagccctgggaagagaggggactcggtgttctatgggccgctgccagagctggtctcttcagagaacccgcccaagtacaggaacttcaccatgtccgagttttacgggaccttcttctcacgagaccttgccagcaaggctctactcgataacttcaagctgtcatcttaatcttaagtgtcgactccagctcgaagaggttagactcgtgtatactatagtcatgcgtgaattgtgattgccggctggcaatgtatagaaaaaaaaaaaaaaaa

SEQ ID NO: 9888 - protein, 378 aa, Zea mays
  misc_feature: Ceres CLONE ID no. 1563630
  misc_feature: Ceres CDNA ID no. 25446752
  misc_feature (219)..(324): Pfam Name: 2OG PFAM Desc: 2OG
  misc_feature: Homolog of GI Number: 52076406 NR Desc: putative 2
  misc_feature: Homolog of GI Number: 52077129 NR Desc: putative 2
  misc_feature: Homolog of GI Number: 50930309 NR Desc: OSJNBa0027O01.11
  misc_feature: Homolog of GI Number: 30102640 NR Desc: At1g06620
  misc_feature: Homolog of GI Number: 8885558 NR Desc: leucoanthocyanidin dioxygenase
  misc_feature: Homolog of GI Number: 34365701 NR Desc: At5g59530
  misc_feature: Homolog of GI Number: 3201632 NR Desc: putative dioxygenase
  misc_feature: Homolog of GI Number: 66730858 NR Desc: 2
  misc_feature: Homolog of GI Number: 3201612 NR Desc: putative dioxygenase
  misc_feature: Homolog of GI Number: 50838953 NR Desc: putative oxygenase
  misc_feature: Useful for making bigger plants
  misc_feature: Useful for making plants with altered leaf shape eg curled leaves
  misc_feature: Useful for making plants with increased biomass
  misc_feature: Useful for modifying plant structure
  misc_feature: Utility: pH Useful for making plants tolerant to high pH or low phosphate
  misc_feature: Utility: No Nitrogen Useful for making plants tolerant to low nitrogen
MASSSLPAPAAGRAELLKAFDDARTGVRGLVESGVSSVPELFRHADPYASIPLAPPGVSIPVVDLSLPPHLAAAAAAAAARTWGFFHLVNHHHALPAAAAAAAAADDYPERAFAAVRAFNELPARERAPHFSRAVDGGVNYSSNVDLYNSPAASWRDTIQILLGPNRHPDLADRIPAACRAEVLEWEVRATAVARALLRLLSQGLGLRPEALEDASCADGKLMVCHYYPHCPEPERTMGIVPHTDPGVLTVLAQDGVGGLQVKHQDEDGKISWVDVKPVPGALVINVGDLLQIMSNDKYTSVEHRVVMNTREEPRVSIGIFFSPGKRGDSVFYGPLPELVSSENPPKYRNFTMSEFYGTFFSRDLASKALLDNFKLSS

SEQ ID NO: 9889 - DNA, 1753 bp, Zea mays
  misc_feature: Ceres CLONE ID no. 1563812
  misc_feature: Ceres CDNA ID no. 40041472
  CDS (106)..(1557): REFERENCED BY SEQ ID NO: 9890
aaaaaaaagcactcaacgtctcctccagtccttcgaaaaccctgaaaccttggtgaagccgagacgagtttgaggcaattatccaagcagctagtgctagcatctatggcgacctccgttcgtggtttcagtagcgccccctgcagggatgtgccgggcagctacggccttccgctggtgggcgccgtccgcgaccgcctcgacttctactacttccagggccaggacaagtacttcgagtcccgcgtggagcgctacggctccaccgtggtgcgcatgaacgtcccgccgggccccttcatggcgcgcgacccgcgggtggtggcggtcctggacgccaagagcttccccgtcctcttcgacatggacaaggtggagaagaaggacctgttcacgggcacctacatgccctccacctccctcaccggcggccaccgcgtctgcgcctacctcgacccctccgagcccacccacgccaaggtcaagcagctgctcttctccctcctgctctcccgcaaggacgacgtcatccccgtcttccgctccaacttctcctcgctgctcgccaccgtcgagtcggacctcgcccagggcggcaaggccgagttcaacaagctcaacgacgtcacctccttcgacttcatcggcgaggcctacttcggcgtgcgcccctcggcgacggacctcggcaagggcgggcccaccaaggcggccaagtggctcatctggcagctccacccgctcctcacgctcggcctccccatggtcctcgaggagccgctgctccacacgttccacctcccgcccttcctcgtcaagggcgactacggggcgctgtacaagtacttctccacggtggcgaagcaggcgctggacaccgccgagggcctgggcctgtcgcgcgaggaggcctgccacaacctcctcttcgccaccaccttcaacagctacggcggcctcaaggtgctgttcccgggcatcctggccaacgtcgccagcgccggcgagaagctccacgagcggctcgtggctgagattcgaggcgccgtggccgaggccggcggcaaggtcaccctcgcggcggtggagaagatggagctggtcaagtcggtcgtgtgggagtcgctgcgcctagacccgcccgtcaagttccagtacggccacgccaagaaggacctgcaggtccagagccacgacgccgtgttccaggtgaagaagggcgagatgctgttcggctaccagccgtgcgccaccaaggacccccgcgtgttcggcgccacggccaaggagttcgtgcccggccggttcctcggcgaggagggcagcaagctgctgcagtacgtctactggtccaacggccgcgagaccgagaaccccaccgtcgacaacaagcagtgccccggcaagaactttgtggtgctcgtcggcaggctcttcctcgtcgagctcttcctccgttacgacaccttcaccgccgacatcggcaaggacctgctcggcagcagtgtcgtcttcaccagcgtcacgaaagctacctccggtccgggcagcgagtgaaccacccggcgtgtcgtcattggctgtggataggatatatgtttggacgtgagtacgtgacagggtcccatttcttaatttcgtctttaataagatactaggtgagtgcttttacattgcaacggaagcatataatattatgtataaatgtatgttatattgttatgagaaaatgtttgaaaaaaaaaaaaaaaaa

SEQ ID NO: 9890 - protein, 483 aa, Zea mays
  misc_feature: Ceres CLONE ID no. 1563812
  misc_feature: Ceres CDNA ID no. 40041472
  misc_feature (305)..(415): Pfam Name: p450 PFAM Desc: Cytochrome P450
  misc_feature: Homolog of GI Number: 1352186 NR Desc: Allene oxide synthase
  misc_feature: Homolog of GI Number: 29373135 NR Desc: allene oxide synthase
  misc_feature: Homolog of GI Number: 21616113 NR Desc: allene oxide synthase
  misc_feature: Homolog of GI Number: 63029720 NR Desc: allene oxide synthase
  misc_feature: Homolog of GI Number: 7452979 NR Desc: allene oxide synthase
  misc_feature: Homolog of GI Number: 7452981 NR Desc: allene oxide synthase
  misc_feature: Homolog of GI Number: 7581989 NR Desc: allene oxide synthase
  misc_feature: Homolog of GI Number: 32351269 NR Desc: allene oxide synthase
  misc_feature: Homolog of GI Number: 17432492 NR Desc: allene oxide synthase
  misc_feature: Homolog of GI Number: 16506652 NR Desc: allene oxide synthase
MATSVRGFSSAPCRDVPGSYGLPLVGAVRDRLDFYYFQGQDKYFESRVERYGSTVVRMNVPPGPFMARDPRVVAVLDAKSFPVLFDMDKVEKKDLFTGTYMPSTSLTGGHRVCAYLDPSEPTHAKVKQLLFSLLLSRKDDVIPVFRSNFSSLLATVESDLAQGGKAEFNKLNDVTSFDFIGEAYFGVRPSATDLGKGGPTKAAKWLIWQLHPLLTLGLPMVLEEPLLHTFHLPPFLVKGDYGALYKYFSTVAKQALDTAEGLGLSREEACHNLLFATTFNSYGGLKVLFPGILANVASAGEKLHERLVAEIRGAVAEAGGKVTLAAVEKMELVKSVVWESLRLDPPVKFQYGHAKKDLQVQSHDAVFQVKKGEMLFGYQPCATKDPRVFGATAKEFVPGRFLGEEGSKLLQYVYWSNGRETENPTVDNKQCPGKNFVVLVGRLFLVELFLRYDTFTADIGKDLLGSSVVFTSVTKATSGPGSE

SEQ ID NO: 9891 - DNA, 1121 bp, Zea mays
  misc_feature: Ceres CLONE ID no. 1563828
  misc_feature: Ceres CDNA ID no. 40041473
  CDS (68)..(904): REFERENCED BY SEQ ID NO: 9892
aagctcgatcttcaagaaagaagaagcaaatagagcacacagtcgagtgtaaaccatccaaccaatcatggcttcgagttccaggagcaccgtgttttcacttcttctcctggtggcgctgctgctcagctgcagcggcatgagcagcgcggcgcggttgctggaaaaggcgccgcccaaggaggagcacccacatcctgccgtgccggagctgccagaacctgagctgccgccgcaccctaccgacgtcgtgccgcctgagctgcccaaacccgagttaccaccgcacccggccgttgtccccgagctgccgaagcctgaggtgcctcatcaggtgccggagcagccgaagcccgagctgccaccgcacccgacagccgtccctgagctcccgaaacctgaggtgccgcacccagtgccggagctgcccaagcccgaggtgccaccgcacccgacagccgtccctgagctcccgaaacctgaggtgccgcatccagtgccggagctgcccaagcccgagctgacaccgcacccggcggccgtgcccgagctgccgaagcctgaggtgccgcactcagtgccggagctgcccaagcccgagctgccaccgcacccgacagccgtcccggagctcccgaaacctgaggtgccgcacccagtgccggagctgcccaagcccgaactgcctcctcacccggccgtcccagagcttccaaagcctgaggtgcctcacccagtcgcgccagagctgccaaagcctgaactccctcctcacccgaccgtgccagagctgccgcacccagaggttccggaggtgccaaaccacgagctgccgcctctaccgaaagctgagctgccaccgaagccggagggccactacccggagccggaggcgaaaccatgagcggacgtacggtccgagactcggttatctgcacattttcccgcatgcacacgtacgtgtctgttgtatagtagctatatatgatttgtgatgttgtgttcttccgtacgagtcagagagcttacatgtgataagctagtagtacctatcagtttggatccatatgtatacctgaatgaataaagaattctagttgtgtcaaaaaaaaaaaaaaaaa

SEQ ID NO: 9892 - protein, 278 aa, Zea mays
  misc_feature: Ceres CLONE ID no. 1563828
  misc_feature: Ceres CDNA ID no. 40041473
  misc_feature: Homolog of GI Number: 50939009 NR Desc: early nodulin 75 precursor
  misc_feature: Homolog of GI Number: 51963522 NR Desc: PREDICTED OJ1634_B10.112 gene product
  misc_feature: Homolog of GI Number: 7671436 NR Desc: periaxin
  misc_feature: Homolog of GI Number: 15451136 NR Desc: periaxin
  misc_feature: Homolog of GI Number: 8163651 NR Desc: surface protein PspC
  misc_feature: Homolog of GI Number: 8163670 NR Desc: surface protein PspC
  misc_feature: Homolog of GI Number: 8163634 NR Desc: surface protein PspC
  misc_feature: Homolog of GI Number: 8163672 NR Desc: surface protein PspC
  misc_feature: Homolog of GI Number: 10334767 NR Desc: factor H
  misc_feature: Homolog of GI Number: 29367369 NR Desc: proline
MASSSRSTVFSLLLLVALLLSCSGMSSAARLLEKAPPKEEHPHPAVPELPEPELPPHPTDVVPPELPKPELPPHPAVVPELPKPEVPHQVPEQPKPELPPHPTAVPELPKPEVPHPVPELPKPEVPPHPTAVPELPKPEVPHPVPELPKPELTPHPAAVPELPKPEVPHSVPELPKPELPPHPTAVPELPKPEVPHPVPELPKPELPPHPAVPELPKPEVPHPVAPELPKPELPPHPTVPELPHPEVPEVPNHELPPLPKAELPPKPEGHYPEPEAKP

SEQ ID NO: 9893 - DNA, 1050 bp, Zea mays
  misc_feature: Ceres CLONE ID no. 1564041
  misc_feature: Ceres CDNA ID no. 25446565
  CDS (322)..(654): REFERENCED BY SEQ ID NO: 9894
aaggagctccggctagacgcccccctccccgatcccgcaacggcgctggtgaggtggtccgtcgcagtgacgccccctccccgatcccgcaacggcgctggtgaggtggtccgtcgcagcgattgagacaaaagtaagagtatggcgtgtcggatgtgaaggcaaccgcgtcagccatggcggatgaggagcatccagagaggatagaggaggcctccgagggcggccgtgcggtggcccgtggtggcgagtcgcggtggctccaagggtcggcgccagctccgaatcagggcgtagggccaagcttttgcgcctagcgccatgccgcccctgtgcctccacccttccctctctgtgttgccgccggccccgacggagcggcgtcgggtgcctccgcctccttcctggccgccgggggccaagaccgcgacagcaccccacccgcctcacttccttggctcacagacggagcggcgtcggctcctccgcctccttcctggccgccgggggccaagaccgcgacagcgagcggtccgcctccactatgagcagagcggcagtgacaacgcctcctggccatcgacacgggcccacagctccaccccgacgtgcttctctgtgcgctggcgcttcttcgtccttgggcggggctaggccgtagtagagcgccgaacacaggccagcaacgacgcaattgctgctccctagctgcttggagatggaagcgagatttcgaagttataaggcctgcagtgccgtggtcttgcgttgatatctgtagttgtacatagaaaatttctcatttggtgtatgtctttgctactttttccttaaacataaattatatttttataactatttggcagttactgatctatcactgccttactacatgttacctatctggcagttatgagatgcctattcttttcatatgtaaatcctaaaatattcgaatccattttatatgtaaatcctaaaatttttgaatccaaagccacccattacaatattatgtactgaaattatatctcaaaaaaaaaaaaaaaa

SEQ ID NO: 9894 - protein, 110 aa, Zea mays
  misc_feature: Ceres CLONE ID no. 1564041
  misc_feature: Ceres CDNA ID no. 25446565
MPPLCLHPSLSVLPPAPTERRRVPPPPSWPPGAKTATAPHPPHFLGSQTERRRLLRLLPGRRGPRPRQRAVRLHYEQSGSDNASWPSTRAHSSTPTCFSVRWRFFVLGRG

SEQ ID NO: 9895 - DNA, 950 bp, Zea mays
  misc_feature: Ceres CLONE ID no. 1564086
  misc_feature: Ceres CDNA ID no. 36706820
  CDS (2)..(802): REFERENCED BY SEQ ID NO: 9896
aagctgctgccccttcgtcctcgcccctgcttgctggctggctggtctgctctgtcccgtccgtcctactcctacgagcagggaggccagcaggcagctagcacgcaacgactgcacgagctggttgacgagcgagcagggaggccagcaggcagagtcgacggtggagacggaggtgcgcgcggcgcacaacgtgctggaggcgtgcgcgcagacggacgccatggagcgggtcgtcttcacctcctccgtcaccgccgtcgtctggagcggcgccggcgccggcgtcggcgcccacagggaggaggtcgccgacgagaggagctggagcgacctcgccttctgcaggaagttcaagctgtggcacgccctggccaagacgctgtcggagaagacggcgtgggcgctggccatggacaggggcgtcgacatggtggccatcaacgccggcctgctgctggccgcccccgggctcgggctcaccgccgcgcacccctacctaaagggcgcccccgacatgtacgacggcggcgtcctcgctaccgtcgacgtcggcttcctggccgacgcgcacgtcgccgcctacgagtcccccaccgcctacggccgctacctctgcttcagcaacgccgtctgccgtcccgaggacgccgtcaagctcgcccagatgctctcgccggccgcgccacgctcgccgccgccaagcgacgaactgaaggtgataccacagaggatccagggcaagaagctcaacaagctcatgctggagttcgccagcggggtatacggggagctggactaggaaggaactgccgtgccaggccacagatgatgcgatgcgactagggctgttgtattcttttgtacgtagtactatttgtagttttcgcccccctcacaaaaaaaaaggagggaaatctgtttggttggccgaaaaaaaaaaaaaaaaa

SEQ ID NO: 9896 - protein, 192 aa, Zea mays
  misc_feature: Ceres CLONE ID no. 1564086
  misc_feature: Ceres CDNA ID no. 36706820
  misc_feature: Homolog of GI Number: 78709048 NR Desc: cinnamoyl
  misc_feature: Homolog of GI Number: 37537132 NR Desc: putative cinnamoyl
  misc_feature: Homolog of GI Number: 20197297 NR Desc: putative cinnamoyl CoA reductase
  misc_feature: Homolog of GI Number: 25412171 NR Desc: probable cinnamoyl CoA reductase
  misc_feature: Homolog of GI Number: 21553382 NR Desc: putative cinnamoyl CoA reductase
  misc_feature: Homolog of GI Number: 7269948 NR Desc: cinnamoyl
  misc_feature: Homolog of GI Number: 21553548 NR Desc: cinnamoyl
  misc_feature: Homolog of GI Number: 3341511 NR Desc: cinnamoyl
  misc_feature: Homolog of GI Number: 9964087 NR Desc: cinnamoyl CoA reductase
  misc_feature: Homolog of GI Number: 55297607 NR Desc: cinnamoyl CoA reductase
MERVVFTSSVTAVVWSGAGAGVGAHREEVADERSWSDLAFCRKFKLWHALAKTLSEKTAWALAMDRGVDMVAINAGLLLAAPGLGLTAAHPYLKGAPDMYDGGVLATVDVGFLADAHVAAYESPTAYGRYLCFSNAVCRPEDAVKLAQMLSPAAPRSPPPSDELKVIPQRIQGKKLNKLMLEFASGVYGELD

SEQ ID NO: 9897 - DNA, 1201 bp, Zea mays
  misc_feature: Ceres CLONE ID no. 1564151
  misc_feature: Ceres CDNA ID no. 25446033
  CDS (102)..(962): REFERENCED BY SEQ ID NO: 9898
agtaacgtttatatgagctactagttttttgctctaagagaacatccttcatctgattccttatatatagggcaaaaccatcttcagatgtcagcaagagcatgtgtttagacctttctgtgaaggataattctgccaaacccccacggaggcactcaatacaaaccaagccaggagctagtccaaggccaacaccttctggaactgtgactccggtgtctggggttcggtcaaagagatcggaaagccaggggaggtttgataccccgacatcagaagtgtccatgtccatctcaaggcgcaagttcagcacgctttcttcaatctcgtactggatgacacagatcaggctggcagaggctgcttccaagcactcggtttctctgggcttctttaagcttgctcttgaatcagaatgtgagcctttggaccggatgagggaagaactcaagtcctacgtagcacggcatggcctggcgacagaattggaggacccagttaaggacattctccaggtttatgatattttggatgattttgagaagctgaagatctctgcagagccctcacagcaaccaaaaaagtctgacaaggctgctcgtactgccacaaatgcgtcaccgaatggtaacctgaagccaagatcactgaactctgatgctactgaaagcaaggatgctgtaaagaaagagggcatccagaaagtaaatcctggtgcaagggtcagaggctcctgtaacaggaatccagtcaaaaacaccaccgcaaaggaagcagttgccaagaacaccggtaaggaaaccaagaaaggggccaagggtcagcaggaagttagcgaggctccgtcagcccttccaaatcaggaatctgctgatgttgtgaaggagatgacccatgaagataaagagaacaatggcgatattgaaatggcagtggatgttgccgtagcccaagatatctagaacagccggaccaacttcagattcgatccccttttttttctatcgctgaagatgaagtgttagcgtgtggttgcttattttggttttcaattgttaatatgttattagtagagcttgtctgtgtgattgctgtctggctggaccttgaacggtcttcaagagcgtgtcataagttgatgattgctttcattcctctgtcaagtttgcggctttgcatgtgataaaaaaaaaaaaaaaaa

SEQ ID NO: 9898 - protein, 286 aa, Zea mays
  misc_feature: Ceres CLONE ID no. 1564151
  misc_feature: Ceres CDNA ID no. 25446033
MCLDLSVKDNSAKPPRRHSIQTKPGASPRPTPSGTVTPVSGVRSKRSESQGRFDTPTSEVSMSISRRKFSTLSSISYWMTQIRLAEAASKHSVSLGFFKLALESECEPLDRMREELKSYVARHGLATELEDPVKDILQVYDILDDFEKLKISAEPSQQPKKSDKAARTATNASPNGNLKPRSLNSDATESKDAVKKEGIQKVNPGARVRGSCNRNPVKNTTAKEAVAKNTGKETKKGAKGQQEVSEAPSALPNQESADVVKEMTHEDKENNGDIEMAVDVAVAQDI

SEQ ID NO: 9899 - DNA, 1007 bp, Zea mays
  misc_feature: Ceres CLONE ID no. 1564162
  misc_feature: Ceres CDNA ID no. 25446034
  CDS (2)..(694): REFERENCED BY SEQ ID NO: 9900
agcggccggctccctgtccctttccataccggacctttttttgtttttttttctgttcgttcgtttgcttgcttgcttgcgccggttcctcactgaccccctggtgcgtctccttgttcgcagggtcggcaagacctcgctgatgaaccagtacgtcaacaacaggttcaacaaccagtacaaggccaccatcggcgcggatttcctcaccaaggaggtccagatcgacgaccgcctcttctcactgcagatatgggatacggcaggacaggagcggtttcaaagtcttggtgtggcattttataggggagctgactgctgtgttcttgtatatgatgtcaacgtatccaagtcatttgaaaagctcaacaactggcgtgaggaattcctaattcaagccagcccatcagacccagagaatttcccatttgttgtgcttggtaacaagatcgatgttgatggtggtaacagccggactgtttctgagaagaaggctaaagcatggtgtgcttcaaagggaaacatcccctactttgagacgtcggctaaagagggcttcaatgtagaggctgcatttgagtgtatagcgaggaatgctgtaaaaaatgagccagaagaagatatgtatcttcctgatacgattgatgttgggggcgctggaaggcaacaacgttcgtcaggttgtgaatgctagaagatatggagcactgcgatttgctcggttggttggtctgattctctagggcttgtttgggtggcctgtgtcatttcatatatgtatttagtttgcaaaactgctatttgtggacactggatagtttggaagtctgcatgcgggtgcttattgtcgactcccgtgtagatgcagagaactcatttgtaactaccgtttcggtgttgtatcgtatctgcgctagatgctagtgttgtagcgcttttgattgttgatggattgcatatatgtactatatttgtacatgaacagaacgcaaaaaaaaaaaaaaaaa

SEQ ID NO: 9900 - protein, 183 aa, Zea mays
  misc_feature: Ceres CLONE ID no. 1564162
  misc_feature: Ceres CDNA ID no. 25446034
  misc_feature (1)..(154): Pfam Name: Ras PFAM Desc: Ras family
  misc_feature: Homolog of GI Number: 56417345 NR Desc: Rab7
  misc_feature: Homolog of GI Number: 56784369 NR Desc: putative RAB7D
  misc_feature: Homolog of GI Number: 1370188 NR Desc: RAB7D
  misc_feature: Homolog of GI Number: 34904236 NR Desc: RAS
  misc_feature: Homolog of GI Number: 2317874 NR Desc: Rab7 GTP binding protein
  misc_feature: Homolog of GI Number: 4545231 NR Desc: RAS
  misc_feature: Homolog of GI Number: 20465885 NR Desc: putative GTP
  misc_feature: Homolog of GI Number: 30102532 NR Desc: At3g16100
  misc_feature: Homolog of GI Number: 7438407 NR Desc: GTP
  misc_feature: Homolog of GI Number: 1155265 NR Desc: possible apospory
  misc_feature: Useful for delaying flowering time
  misc_feature: Useful for making ornamental plants with modified flowers
  misc_feature: Useful for making shorter plants
  misc_feature: Useful for modifying fruit shape and seed yield
  misc_feature: Useful for modifying plant structure
MNQYVNNRFNNQYKATIGADFLTKEVQIDDRLFSLQIWDTAGQERFQSLGVAFYRGADCCVLVYDVNVSKSFEKLNNWREEFLIQASPSDPENFPFVVLGNKIDVDGGNSRTVSEKKAKAWCASKGNIPYFETSAKEGFNVEAAFECIARNAVKNEPEEDMYLPDTIDVGGAGRQQRSSGCEC

SEQ ID NO: 9901 - DNA, 1030 bp, Zea mays
  misc_feature: Ceres CLONE ID no. 1564227
  misc_feature: Ceres CDNA ID no. 36691170
  CDS (375)..(764): REFERENCED BY SEQ ID NO: 9902
aagctcaccggccgctcagcatggacagctactatttgtactggcaggggaagtggtattggtggtcggggtactggaacgatcctaacgatagtacgcatgcggcggtgctccctgttctatctatctatctatctatctatctatctatctatctatctatctatctatctatctatctatctatctatctatctatctatctatctatcttgtgtttctcttcatgctattgtatccaataaaagagttttcctgtaattttaaccagctagccgccggtgtcttccttgatctatgtgcatgtaggcagacgttacccagcagttaatatagttatattaactaatgcctccttcaactatgcgttgggcatgggagcattagccgaaccacctcaggacagctctgccgacggtgtgatcttgatcaaggatatggcggagtggcaaaagcactgggaccagactgctccatacaacaagctgctggtgtatgagttctacgaaaagaattcctcgctgtgcaaggccatggacaagccgttcgagaagctcgccacgcagtacaaaggcagggccgacttctgcaagctggacgtggacaactttgagcttttggcgcggatttgcggagtggagggagcgtatccgacgttcgtgctgttcaagaaatgcgcgcaggtgggcaaggtcgttggcctcaaggaggacgacctcgagcggatcgtgcagctgcaatccatagagagaaaaatactgtagaagccgcagcgaacaagctgctagctaggagtagtcgtcaactcgtcatgtagtaccacacagactcagttttcgtacgtgtgccaagacaaaactacaaaaggacatgactatgcgtacgcatcgatcggcacagtggcggatctacaccctctgtggctggggcttgatccatgtatctttatataagtctctatttaatacgatataaaatagttaagataaaaaaaaaaaaaaaaaaaaaaaaaaaaaaaaaaaaaaaaaaa

SEQ ID NO: 9902 - protein, 129 aa, Zea mays
  misc_feature: Ceres CLONE ID no. 1564227
  misc_feature: Ceres CDNA ID no. 36691170
  misc_feature (58)..(116): Pfam Name: Thioredoxin PFAM Desc: Thioredoxin
  misc_feature: Homolog of GI Number: 53748519 NR Desc: thioredoxin 3
  misc_feature: Homolog of GI Number: 33621080 NR Desc: thioredoxin H2
  misc_feature: Homolog of GI Number: 46326970 NR Desc: thioredoxin
  misc_feature: Homolog of GI Number: 66096352 NR Desc: thioredoxin H
  misc_feature: Homolog of GI Number: 1388078 NR Desc: thioredoxin h
  misc_feature: Homolog of GI Number: 21595244 NR Desc: thioredoxin
  misc_feature: Homolog of GI Number: 34897150 NR Desc: putative thioredoxin
  misc_feature: Homolog of GI Number: 50934869 NR Desc: putative thioredoxin
  misc_feature: Homolog of GI Number: 552132 NR Desc: Bkm
MGALAEPPQDSSADGVILIKDMAEWQKHWDQTAPYNKLLVYEFYEKNSSLCKAMDKPFEKLATQYKGRADFCKLDVDNFELLARICGVEGAYPTFVLFKKCAQVGKVVGLKEDDLERIVQLQSIERKIL

SEQ ID NO: 9903 - DNA, 1220 bp, Zea mays
  misc_feature: Ceres CLONE ID no. 1564438
  misc_feature: Ceres CDNA ID no. 25446035
  CDS (232)..(873): REFERENCED BY SEQ ID NO: 9904
aatctcgcgtcgaacaatgggaaagaactccttccttcacagttcacgcggacggatatctcgtctcggtcagttcgcttcgtgagttatctttatctcctctcgatcgatcgcttcctccatcgaggcggtaaagcgccgcccagatcgccggaagcaagcggcgacctcaccagctccgagcagcagcagggaggctcgtggaaccattagtcgttttctggcagcggcatggaggggctgagctggagaacggtgtgttgtttatcggtgctctgtgccgtgctgttcttgcgcccggccgagggcatccgcttcgtgatcgatagggaagagtgcttctcgcataacgtggaatacgagggggatactgtccatgtatccttcgtcgtcatcaaggctgacaccccgtggcattacagcgaggagggcgtcgatcttgtggttaaggatcctaatggcgctcaagtccgtgattcccgagataagactagtgacaagtttgagttcatagttcagaagagaggcgtccatcgcttctgcttcacgaacaaatccccatatcacgaaacgatagacttcgatgttcatgttggccatttttcatatttcgagcagcatgccaaagatgagcattttgcaccactttttgagcaaataggcaagttggatgaggcactttacaatattcagttcgaacagcactggctagaggcccagactgaccgtcaagcaatattgaacgagaacatgagcaggagggcagtccataaggcgctcttcgagtcagcggcgctgatcgccgccagcgtcatccaagtctacctcctgcgccggctcttcgagcgcaagctggggacgtctcgggtttaaggcaacagtagccaacttgcccttcgcagccaccatgatcacaccgacataaccgttacgaattcgaatggttgctagatcagctaaataccacatgtttgtggacttcagttacatgtaatattttttttgtgattccacagatgagaactcttcaaagtttaaaccgtcgatttagccttcattctgcctcagcattttatcgccttgtttctgtagtagcaaccagtaacaacaaggttgcctgtagtctgtacaagatagtagaggtttttttttctgtgctggttgtacgacacaactgtgaatgacttgccgtagacggataccaaaaaaaaaaaaaaaaa

SEQ ID NO: 9904 - protein, 213 aa, Zea mays
  misc_feature: Ceres CLONE ID no. 1564438
  misc_feature: Ceres CDNA ID no. 25446035
  misc_feature: null
  misc_feature: Useful for making plants with altered cell wall content and/or composition
  misc_feature (58)..(121): Pfam Name: EMP24_GP25L PFAM Desc: emp24/gp25L/p24 family
  misc_feature: Homolog of GI Number: 51965042 NR Desc: PREDICTED P0702E04.27 gene product
  misc_feature: Homolog of GI Number: 21595553 NR Desc: putative coated vesicle membrane protein
  misc_feature: Homolog of GI Number: 6466951 NR Desc: putative coated vesicle membrane protein
  misc_feature: Homolog of GI Number: 50918609 NR Desc: putative cop
  misc_feature: Homolog of GI Number: 20147305 NR Desc: AT3g22845/MWI23_22
  misc_feature: Homolog of GI Number: 72077195 NR Desc:  similar to Cop
  misc_feature: Homolog of GI Number: 54642981 NR Desc: GA17522
  misc_feature: Homolog of GI Number: 41054687 NR Desc: coated vesicle membrane protein
  misc_feature: Homolog of GI Number: 54642982 NR Desc: GA17526
  misc_feature: Homolog of GI Number: 57093819 NR Desc:  similar to CGI
MEGLSWRTVCCLSVLCAVLFLRPAEGIRFVIDREECFSHNVEYEGDTVHVSFVVIKADTPWHYSEEGVDLVVKDPNGAQVRDSRDKTSDKFEFIVQKRGVHRFCFTNKSPYHETIDFDVHVGHFSYFEQHAKDEHFAPLFEQIGKLDEALYNIQFEQHWLEAQTDRQAILNENMSRRAVHKALFESAALIAASVIQVYLLRRLFERKLGTSRV

SEQ ID NO: 9905 - DNA, 946 bp, Zea mays
  misc_feature: Ceres CLONE ID no. 1565266
  misc_feature: Ceres CDNA ID no. 29191221
  CDS (176)..(730): REFERENCED BY SEQ ID NO: 9906
actcgtctccctagtcctgttgtgccggacccctgcgccgcacccgcacggcaacagcatcgacctaggcccggtcccgtgtcgcttcgtagttcgtccccttccccgcgcccccagcagcagcggattcccctcgagagatccggcccttggcgcggtcgccggagagagcggcatggggctctgggactcgctcctcaactggctccggagcttgtttttcaagcaagaaatggagctctccctcgttgggttgcagaatgctgggaagacgtcgctggtcaatgctgttgctacaggtggctacagcgaggacatgattccaacggtaggcttcaatatgcggaaggtcaccaagggaaatgtcacgattaagctttgggatcttggtgggcagcggagattccgcactatgtgggagcgctattgccgtggagtttctgctattctatatgttgtggacgctgctgaccgagatagtgtcccaatcgcgaaaagtgagttgcatgatctgctgacgaaacagtctttggctgggattcccttgcttgtccttggcaacaaaattgacaagtcagaagcgctttcgaagcaggccttggttgatcaacttggactggaattgataaaggaccgtgaggtttgttgctacatgatctcctgtaaggattctgtgaacatagacgtcgtcatcgactggcttatcaagcactctagaacagcgaagtaggctttctgtgtgtttgtatcgcttgatgcacggtgttttatcttttgtgaatctgagcctggttccttggtcccgatgttaaaagcggccaccttgtaatttatgacctctttggtgtcacagacgaactgcatggtatctagactagaaacatgtcttccctttgtaaatcctttgaacctttgattattcttactgtgaaaaaaaaaaaaaaaa

SEQ ID NO: 9906 - protein, 184 aa, Zea mays
  misc_feature: Ceres CLONE ID no. 1565266
  misc_feature: Ceres CDNA ID no. 29191221
  misc_feature: null
  misc_feature: Useful for making plants with altered terpenoid content
  misc_feature: Homolog of GI Number: 50912455 NR Desc: putative ADP
  misc_feature: Homolog of GI Number: 21553410 NR Desc: ADP
  misc_feature: Homolog of GI Number: 21593081 NR Desc: ADP
  misc_feature: Homolog of GI Number: 9757978 NR Desc: ADP
  misc_feature: Homolog of GI Number: 21389677 NR Desc: ADP
  misc_feature: Homolog of GI Number: 9757877 NR Desc: ADP
  misc_feature: Homolog of GI Number: 76648606 NR Desc:  similar to ADP
  misc_feature: Homolog of GI Number: 68369362 NR Desc:  similar to ADP
  misc_feature: Homolog of GI Number: 50754608 NR Desc:  similar to ADP
  misc_feature: Homolog of GI Number: 38174393 NR Desc: ADP
  misc_feature: Useful for increasing chlorophyll and photosynthetic capacity
  misc_feature: Useful for making plants with increased biomass and foliage
  misc_feature: Useful for making shorter plants
  misc_feature: Useful for making smaller plants
  misc_feature: Useful for making stronger plants
MGLWDSLLNWLRSLFFKQEMELSLVGLQNAGKTSLVNAVATGGYSEDMIPTVGFNMRKVTKGNVTIKLWDLGGQRRFRTMWERYCRGVSAILYVVDAADRDSVPIAKSELHDLLTKQSLAGIPLLVLGNKIDKSEALSKQALVDQLGLELIKDREVCCYMISCKDSVNIDVVIDWLIKHSRTAK

SEQ ID NO: 9907 - DNA, 987 bp, Zea mays
  misc_feature: Ceres CLONE ID no. 1565325
  misc_feature: Ceres CDNA ID no. 25446566
  CDS (109)..(459): REFERENCED BY SEQ ID NO: 9908
agccgtaccaatccccatcgccccagaccacagcgcgacagtgagtacagcagcagcagctgagagcgtgagagcgtgcgaagcaggagggaggacaagaagaagccgatggcggttgtgagcggcagcggcgggaggctgaacccctgggcggagcccttcgtgccttccggggcgcggtaccgcggcctgcggaccgtggaggcgacgccggagcaggaggtggaggacttctcccccgagtggtggcgcctggtgtccgcctccccggccttccgcgaccgctggctgcgcgagtacggcgcgctcggcctactcgacgccgaggacgacctggacgacgacgtcgacagcttcctccccgacgacttcttctcgcctccggccccgcgctacggtaaagccgcctcctctgtctgtgtacctgtctttgctgctacaagtacctttagcaattagcactgctgactcggtgtgtgtgtgtgtgtgtgtgtcgtggcgttcggacggagcagagagcgagcgggaggacgccgcgggcaggagggcgggccgagggcttgaggtggcggcgtggggcatcgacaggtggtggagggcgcacggtgggccgccggagaccccgaggtacgcggagaaggcgccgcggagggtggccgccgccgccagggtgagcccccgccccatccagcagccgcgctgaaggaccagatccgttcatccaccgacggctgctcagtcagtgtcacatcttggcacagggggaaaaataggcacgaaaaaaagagttccctttcttgaatcgatgcagtttgctttggtgttcgtctcgcgcagtttctggatctgggctccgcttcagctcgagatcctctgctgcgttgtctcttgtctgtgctaattctcatggctgtactgtgtaaatatgaagatgtaataacaataacacgcagtgtgactttttagcttccaaaaaaaaaaaaaaaa

SEQ ID NO: 9908 - protein, 116 aa, Zea mays
  misc_feature: Ceres CLONE ID no. 1565325
  misc_feature: Ceres CDNA ID no. 25446566
  misc_feature: Homolog of GI Number: 8489786 NR Desc: dehydration
  misc_feature: Homolog of GI Number: 56481323 NR Desc: early response to dehydration 15
  misc_feature: Homolog of GI Number: 56481295 NR Desc: early response to dehydration 15
  misc_feature: Homolog of GI Number: 56481331 NR Desc: early response to dehydration 15
  misc_feature: Homolog of GI Number: 33415268 NR Desc: poly
MAVVSGSGGRLNPWAEPFVPSGARYRGLRTVEATPEQEVEDFSPEWWRLVSASPAFRDRWLREYGALGLLDAEDDLDDDVDSFLPDDFFSPPAPRYGKAASSVCVPVFAATSTFSN

SEQ ID NO: 9909 - DNA, 1243 bp, Zea mays
  misc_feature: Ceres CLONE ID no. 1565332
  misc_feature: Ceres CDNA ID no. 40352050
  CDS (124)..(978): REFERENCED BY SEQ ID NO: 9910
aacttgtctttacaaatcgactatatgtactgcgcctctattcccgtaagaccaagaaagacctgaacctgatacaccttgcctctccccactaagcttgtttaccacgcttgtagataagacatgggtcaagcactcggcttgattcaagtggatcaatcgacagtagccatcaaggaaacttttgggaagtttgacgaggtcctagagcctggatgccacttcttgccatggtgcatagggaagcaaattgctgggtatctgtcactgcgtgtgcagcggcttgatgtccgctgcgaaacaaagacaaaggataatgtcttcgtcaatgttgtggcatctgtgcaatatcgtgcccttgccgataaggcatctgatgcattttacaggcttagtaacaccagggagcaaatccagtcatatgtttttgatgtcatcagggcaagtgttccgaagatgaacttggatgatgcctttgagcagaagaatgaaatcgccaaagctgtagaaaatgaacttgaaaaggcaatgtctatgtatggatacgagattgtgcagactctgattgttgatattgagcctgatgagcatgtgaagagagctatgaatgagatcaatgcagctgctaggctgaggttggctgccagcgagaaagctgaggcagagaagatactgcagatcaagagagccgaaggtgatgcagaatccaagtacttggcgggtctgggtatcgcaagacagcgccaggctatagtggatgggctcagagacagtgttcttgctttctctgagaatgtgcctgggacctctgcaaaggatgtcatggacatggttctggttacccagtacttcgacaccatgaaggagattggggcctcgtccaagtcctcgtcggttttcatccctcatggaccaggtgctgtcagagacatcgcagcgcagataagggatggtcagctccaggccagtctgctgtgagcacgttggaaaaggcatgcttttgacattcccatcagtaaagaagtacatatacatcatgaggagtaaaaaaaaacttactagcgataatgtgagtacagcttgttcgttctatctatatggtgcatgtgattattattatggagattaatgttaaataggttcgcatgtattgtgccagaacaaggctaaggaccagtttgcgtaaaaaaatgtatgtttggaacttatctaagttttggagcctgagtaaaaaaaaaaaaaa

SEQ ID NO: 9910 - protein, 284 aa, Zea mays
  misc_feature: Ceres CLONE ID no. 1565332
  misc_feature: Ceres CDNA ID no. 40352050
  misc_feature (7)..(193): Pfam Name: Band_7 PFAM Desc: SPFH domain / Band 7 family
MGQALGLIQVDQSTVAIKETFGKFDEVLEPGCHFLPWCIGKQIAGYLSLRVQRLDVRCETKTKDNVFVNVVASVQYRALADKASDAFYRLSNTREQIQSYVFDVIRASVPKMNLDDAFEQKNEIAKAVENELEKAMSMYGYEIVQTLIVDIEPDEHVKRAMNEINAAARLRLAASEKAEAEKILQIKRAEGDAESKYLAGLGIARQRQAIVDGLRDSVLAFSENVPGTSAKDVMDMVLVTQYFDTMKEIGASSKSSSVFIPHGPGAVRDIAAQIRDGQLQASLL

SEQ ID NO: 9911 - DNA, 875 bp, Zea mays
  misc_feature: Ceres CLONE ID no. 1565377
  misc_feature: Ceres CDNA ID no. 25892050
  CDS (83)..(556): REFERENCED BY SEQ ID NO: 9912
aacccacggctcgagctcgcagcgacaggcacaggcagcaaggctggtttccttcctcgtcgaacgtctgccgctgctcgcgatggccggacgcggaggaggtagcaagagtagcctgtacgcggcgctgggcgtggccagcgactgctccgacgccgagctgcgcagcgcctaccgcaagctcgccatgaaatggcacccggacaagtgcgccggcgcagggagctccggcggcggcgcggacgccgccaaggccaggttccagaagatccagggagcgtacgccgtcctgtcggaccccaacaagcggatcctgtatgacgtcagggcctacgacggcgaaggcgacgatgacggcgccggggagatcctcggagacattctcgaggccatgagccaggcaggccctgccgccgacaacggcaagggggagagcctggaggacctgcagcggcagttcgaggagctgttcctgaggccgtcgccgtcgtccttctcgccgaacgacgcagctgggaagtcggcttccaagagtaggcctgctgggaggaaatagacaggacactgcggcgaataggtcggtccagctactcctgttccagataagctacgacctacgaggtaccgatacctggccaggagcccaggacagcgacctgcgacggcgacgaggctgccagtgctgcacgctcaagtacatgctccgagttgtagctactactgtagatcggcacggcagtcgccagaatggtaccataaggcggccgtacgcacacacgcatgaacgctgtttttaccatctcaggttcgctgcaaaatttccagcgtgttctctgtaaaatccctgcatgattgctataaaaaaaaaaaaaaaa

SEQ ID NO: 9912 - protein, 157 aa, Zea mays
  misc_feature: Ceres CLONE ID no. 1565377
  misc_feature: Ceres CDNA ID no. 25892050
  misc_feature (11)..(83): Pfam Name: DnaJ PFAM Desc: DnaJ domain
  misc_feature: Homolog of GI Number: 30102878 NR Desc: At1g56300
  misc_feature: Homolog of GI Number: 21554587 NR Desc: DnaJ protein
  misc_feature: Homolog of GI Number: 79321157 NR Desc: heat shock protein binding / unfolded protein binding
  misc_feature: Homolog of GI Number: 12321759 NR Desc: DnaJ protein
  misc_feature: Homolog of GI Number: 23428796 NR Desc: DnaJ
  misc_feature: Homolog of GI Number: 1350548 NR Desc: heat shock
  misc_feature: Homolog of GI Number: 53793391 NR Desc: heat shock
  misc_feature: Homolog of GI Number: 34912486 NR Desc: heat shock protein
  misc_feature: Homolog of GI Number: 56472602 NR Desc: DnaJ family protein
MAGRGGGSKSSLYAALGVASDCSDAELRSAYRKLAMKWHPDKCAGAGSSGGGADAAKARFQKIQGAYAVLSDPNKRILYDVRAYDGEGDDDGAGEILGDILEAMSQAGPAADNGKGESLEDLQRQFEELFLRPSPSSFSPNDAAGKSASKSRPAGRK

SEQ ID NO: 9913 - DNA, 1013 bp, Zea mays
  misc_feature: Ceres CLONE ID no. 1565702
  misc_feature: Ceres CDNA ID no. 25446567
  CDS (62)..(679): REFERENCED BY SEQ ID NO: 9914
aatttttccttgtctctgtttttctttgtactggactccccctacttctgacaagaagaaaatgcaacgggcagtgcaggccgtcaggtcacacggcaatgttcttaaatatgctgttctacaacacatcagcgctcccaagccagcaatgcttcctgctgccttttctcgtttcatgtcagtttcatctgctcgcctagaggatcgtggatttgaaactgccactgtagcagatgtcttgaagtctaaagggaagagtgctgatggatcttggctctggtgcaccacagaggatagcgtctatgacgctgtcaaatctatgactcagcacaacgtgggagctttggtggttgtcaaacctggacagaataaatcaatcgctggcattgtcactgagagagattatctccggaaaatcatagtgcagggaaggtcttccaagtcaactaaggttggcgacatcatgactgaagagaacaaactgatcacagtgaatcccgacaccaaggtcctgcaggcaatgcagctcatgacagaaaaccgcgtcagacacatcccggtgatcgacggcacggggatgctggggatggtctccatcggcgacgtcgtgcgcgcggtggtggccgagcacagggaggagctgaaccggctcaatgactacatccagggaggctactaggacggcgtgtgcagcgacgaccccctccgatcccgccagtcagtgaagtccgcctttgaaatccaataactcggaacaatgatgatgacgaaataggccgtgttttcttggacaatgatgttaagttcggcaaggttttcctttctctttttttattctactgcgtggtctatgtgtatattgccaaaggcatgcgtgagccatgcgcccggtgctggggcgcagagaccatctgatggtggaaacaccggaaataagagcgtgccgctgtgtgtttcctttgaaggaataaaaatggtgttcgtgttgtgcaaaaaaaaaaaaaaaaaaaaaa

SEQ ID NO: 9914 - protein, 205 aa, Zea mays
  misc_feature: Ceres CLONE ID no. 1565702
  misc_feature: Ceres CDNA ID no. 25446567
  misc_feature (73)..(187): Pfam Name: CBS PFAM Desc: CBS domain pair
  misc_feature: Homolog of GI Number: 47027028 NR Desc: CBS1
  misc_feature: Homolog of GI Number: 55296028 NR Desc: CBS domain protein
  misc_feature: Homolog of GI Number: 34913008 NR Desc: P0663E10.18
  misc_feature: Homolog of GI Number: 72608229 NR Desc: CBS
  misc_feature: Homolog of GI Number: 46321816 NR Desc: COG0517: FOG: CBS domain
  misc_feature: Homolog of GI Number: 67548342 NR Desc: CBS
  misc_feature: Homolog of GI Number: 46314014 NR Desc: COG0517: FOG: CBS domain
  misc_feature: Homolog of GI Number: 9188545 NR Desc: inosine
  misc_feature: Homolog of GI Number: 15668834 NR Desc: inosine
MQRAVQAVRSHGNVLKYAVLQHISAPKPAMLPAAFSRFMSVSSARLEDRGFETATVADVLKSKGKSADGSWLWCTTEDSVYDAVKSMTQHNVGALVVVKPGQNKSIAGIVTERDYLRKIIVQGRSSKSTKVGDIMTEENKLITVNPDTKVLQAMQLMTENRVRHIPVIDGTGMLGMVSIGDVVRAVVAEHREELNRLNDYIQGGY

SEQ ID NO: 9915 - DNA, 1188 bp, Zea mays
  misc_feature: Ceres CLONE ID no. 1565806
  misc_feature: Ceres CDNA ID no. 25401652
  CDS (105)..(686): REFERENCED BY SEQ ID NO: 9916
aatggcgccttcctctacgtgcctctccctggggctgagctccctcacgctcggatctctcccttgctcctgcagctcgccctctcttcctcaagctcgtccccatggcgcctggcccgagcttggcctctgctccaacttccctagtcgcgcctagccgaggtccctcccacgcgcgcagctccgatccctcacccatctcccatggccgcaccgctcctctctctcgcgctcggctccttaccggcggattccctggccgtgagctctggcaccagccgcccattcgtgctcgtctctggagctcgtccgaccccaagctgcgctcgcccgtggacgtcgaacttgctcaagtccggtcgtcctcaaccttcggtctctgctcgtcccagccgatgcccatctccctccaagccgagctcgtctccactactccagctgcaagccgccggccatggtgcttttcctggcggccatccggttatgcgtcactgtgcctttggtcttgctcattgacggccgccattacctcaccgaccgtgaccctatctccgttcttcaagtcgcccagccatctgttgggtccgccagcgacgaccgtcgtagagcactgctcgacctcctccatgcatgaacagcagcaaccccgagcctcctctgcgtcgcgccatcaacccgctcgatagaatgccgcagcgagctctacccgatctgcagcgcctgcgcaccatcgtcgaaatccccgcaactgtgttggtctgcaacagcacgtcgtcgatctgcaatccctagccttgtggtcgaccttgccctccgtcgatgtcgcgtcttgcgcatcgcttgctcgacggaagcctcactcgtgaacaacatgcgcgactcatccgatccctcttaggttcttattgttgttcgtcgcctcacctcgatgccggctcctacaagtctccaacttgtgttcacgccaaaaatccgagaagattaggcgtagagggaaacaaatcagtacgcagccgaaaaatcttcgatgtggatggagaaggcagtaaagtccgcatggtgctcaccacatgctcgaagtaatggcgggatcggaaatcatggttgtgttcatggcctttgagacagattaaattattggtgagctatcgtcgctctcgctcttcgttttaaaaaaaaaaaaaaaaa

SEQ ID NO: 9916 - protein, 193 aa, Zea mays
  misc_feature: Ceres CLONE ID no. 1565806
  misc_feature: Ceres CDNA ID no. 25401652
MAPGPSLASAPTSLVAPSRGPSHARSSDPSPISHGRTAPLSRARLLTGGFPGRELWHQPPIRARLWSSSDPKLRSPVDVELAQVRSSSTFGLCSSQPMPISLQAELVSTTPAASRRPWCFSWRPSGYASLCLWSCSLTAAITSPTVTLSPFFKSPSHLLGPPATTVVEHCSTSSMHEQQQPRASSASRHQPAR

SEQ ID NO: 9917 - DNA, 1216 bp, Zea mays
  misc_feature: Ceres CLONE ID no. 1566493
  misc_feature: Ceres CDNA ID no. 40352051
  CDS (70)..(813): REFERENCED BY SEQ ID NO: 9918
aaaaaaaccaacgtgcttgatctccctccgccactccatccatctcctcgctcccagtccccgggaagcatggcgtccgtcaccgcccgcgccccggtagcggcccttcgcccgtcgtcggcatcgctcaagtcgtcgtcggccttccttggccactctagccgcctcggccgcaccgcgtctcccacgaggcgcagcctcaaggcggaggccaagggcgagtggctccccggccttccctccccctcctacctcgacggcagcctggcgggtgacaatggcttcgacccgttgggcctggcggaggaccccgagaacctgcggtggttcgtgcaggcggagctggtgaacggccggtgggccatgcttggcgtggccgggatgctcatcccggaggtgctgaccaaagccgggctgatcaacgcgccgcagtggtacgacgccggcaagtcggagtacttcgcgtcgtcgtccacgctgttcgtggtcgagttcatcctgttccactacgtggagatccggcggtggcaggacatcaagaaccccggcagcgtcaaccaggaccccatcttcaagagctacagcctgccgccgcacgagtgcggctacccgggcagcgtcttcaacccgctcaacttcgcgcccacgctcgaggccaaggagaaggagctcgccaacgggaggctggcgatgctggcgttcctgggcttcctgatccagcacaacgtcaccggcaaggggcccttcgacaacctgctgcagcacctgtctgacccatggcacaacaccatcatccagaccttctccggttgagtcgaggtcgaggagggatacgatccatcgctggtgagctgatatggactggaaggcaaacattgaaaccttaagttcctttctggatcagtttgtgtgtgttgttaatctatctggagggtacagattcgggccgtgttgcaatgcatgcatggtctgaagggagcgagggctgaggagtgactggtatgtacattagctgaaggggatattaagggtagagatcgtttgatcagtatcatctgtatatccccatgcatggggtttcgttttgtgcgcttacttctggcttgccagcgtatggttcaatgtggaaacacatgtattagtacgagaactagtagacttataattaatataaatcaagcacgtacgacttctagctgaaaaaaaaaaaaaaaaa

SEQ ID NO: 9918 - protein, 247 aa, Zea mays; identical to SEQ ID NO: 9814
  misc_feature: Ceres CLONE ID no. 1566493
  misc_feature: Ceres CDNA ID no. 40352051
  misc_feature (57)..(219): Pfam Name: Chloroa_b PFAM Desc: Chlorophyll A

SEQ ID NO: 9919 - DNA, 1950 bp, Zea mays
  misc_feature: Ceres CLONE ID no. 1568435
  misc_feature: Ceres CDNA ID no. 40041476
  CDS (3)..(1505): REFERENCED BY SEQ ID NO: 9920
aagccggcgcctttcacgccgtgcctctcccacgccttgaccacggccacccgcgcctcctcgcctcccgcaagcccaccccgcgcgcgcccgccccggcggcgttggcgtctccctcctctccggccgctatggcaggggagaacgacccccgcagcggcggctacggcggcggtcccgttcccgtcgacgcgtgcccgctctgcggcggggccaacgggcccccttcgcgcgtcgccctcgccaggcgggccccgcccggcgacgccctcgcgctggcggtggcgttgtcccccgccgacgaggcgtccgcgctgcgcgaggcgctggcgcggcaccggcgcggcgtcgcggacctgcaggcggagctggaggccgagcgcggcgccgccgcgggcgccgccagcgaggccatgtccatgatcctgcgcctgcagcgcgagaagtccgaggccatgatggaggcgcgccagtaccggcgctacgccgaggagcggttcgcgcacgacgccgccgaggccgccgcgctgcacgacgcgctcggccgccgcgacgccgccgtccgctcgctcgccgccaggctccggtcctgccaggcgcgcctgctccacctcggcttcccttccccgtcctccccgaccgcggccgcggccgaggccgaccatcccttctgctcctccgacggcgacgacggttaccattccgtccactgcctcgacgaccaccccgccgacgagggcaccccgcgcgccccccacggagctcccagccccccggactccgataagccggtcgtcatgtttggctcgccgcgccgctcgtcacgccacgtccgcacgttctccggcgacggcggcccgtacagctgccgggtcgctctggccgacgagttcccgctcttcacggacagggacgcgccggggcaggacgacgacgaggaggccgaccgggtgtacacggtcgacgcggtgcatggcgtgccggtcatggcgcgtgacgacgactgctgcgactttgggaccacgtgggagggcgaggtgggcgctcgttctggggccgcgggctgggcggaggaggacgagatacaggaactcaaagccaggttgcacgcgttggaggcggatcgggagtccatgcggcacgccatcatggccatgggagatgagaaggcgcaggtcgttctgctcagggagatcgctcagcagctctgcagggacgcggcaccgttccctgctgtcccgctcaaggtgcagccaaggccacagccgtttgtcatggcacagaggaaggtggtgaagaggcactcgtccttcgctaagatctttattgtcacagtgatcaagtgggtcatgtctatcttttgctggcgacggaaatcagatcgcgtaaggtatccgatcggtatgtgtgggagcaacgtcggattgatgctggtactggataggttccccaaacagagacaaaagaagattcctaaaaggaagctaagtgcctccattctttgataatctgattacaggcgacctagggaaagctgagtcatgcctctgcgattatctgacccgaatgagcagttctctgaacataaaaagctggctttgtgaagaagcaattgttgtcgcacatcgttccaaccctttttcatatgcattctttggttgatttcgtttttggcaatctagctaaaatgttgatatcctttgtgtttccttcctctgtctgccttttttttctacatatatcgttgatattctttttttgtgcagtagcatcgataagtccactgtgaataaaacacggaccattttaatcattagcagtaggcagcagggttcgtttttcttttctctctgtcaccttctctcccgttttgtggaacaaaatcatattctgttgtaagcaaatttcaaactgaatagcttgttttgtggggaaaaaaaaaaaaaaaaa

SEQ ID NO: 9920 - protein, 457 aa, Zea mays
  misc_feature: Ceres CLONE ID no. 1568435
  misc_feature: Ceres CDNA ID no. 40041476
  misc_feature: Homolog of GI Number: 66776103 NR Desc: LigA
  misc_feature: Homolog of GI Number: 66778264 NR Desc: LigA
  misc_feature: Homolog of GI Number: 66779191 NR Desc: LigA
  misc_feature: Homolog of GI Number: 66779656 NR Desc: Insulinase
  misc_feature: Homolog of GI Number: 67987177 NR Desc: 4Fe
  misc_feature: Homolog of GI Number: 2078483 NR Desc: antifreeze glycopeptide AFGP polyprotein precursor
  misc_feature: Homolog of GI Number: 67640326 NR Desc: COG3321: Polyketide synthase modules and related proteins
  misc_feature: Homolog of GI Number: 66778899 NR Desc: UvrD/REP helicase
  misc_feature: Homolog of GI Number: 67985765 NR Desc: Pantoate
  misc_feature: Homolog of GI Number: 67987301 NR Desc: similar to multitransmembrane protein
MAGENDPRSGGYGGGPVPVDACPLCGGANGPPSRVALARRAPPGDALALAVALSPADEASALREALARHRRGVADLQAELEAERGAAAGAASEAMSMILRLQREKSEAMMEARQYRRYAEERFAHDAAEAAALHDALGRRDAAVRSLAARLRSCQARLLHLGFPSPSSPTAAAAEADHPFCSSDGDDGYHSVHCLDDHPADEGTPRAPHGAPSPPDSDKPVVMFGSPRRSSRHVRTFSGDGGPYSCRVALADEFPLFTDRDAPGQDDDEEADRVYTVDAVHGVPVMARDDDCCDFGTTWEGEVGARSGAAGWAEEDEIQELKARLHALEADRESMRHAIMAMGDEKAQVVLLREIAQQLCRDAAPFPAVPLKVQPRPQPFVMAQRKVVKRHSSFAKIFIVTVIKWVMSIFCWRRKSDRVRYPIGMCGSNVGLMLVLDRFPKQRQKKIPKRKLSASIL

SEQ ID NO: 9921 - DNA, 1863 bp, Zea mays
  misc_feature: Ceres CLONE ID no. 1568576
  misc_feature: Ceres CDNA ID no. 25445585
  CDS (117)..(1688): REFERENCED BY SEQ ID NO: 9922
actacagctccagattgtattcaaagagaggcagcgcagggtgcaagaagctgtccctccctccctcccctgtgcttctgctagctaggtgcctgcggaggagagatagggatacgatggccggcggtggcatcgtgaacacgggcggtggcaaggactaccccggcaagctcaccctcttcgtgttgctcacctgcatcgtcgccgccaccggcggtctcatcttcggatatgacatcggtatctcaggcggcgtgacgtccatgaacccgttcctggagaagttcttcccggaggtgtaccggaagaagcaggaggccaagacgaaccagtactgcaagtacgacaaccagctgctgcagaccttcacctcctccctctacctggccgcgctggtcgcctccttcttcgccgccaccgtcacccgcgccgtcggccgcaagtggtccatgctcgtcggcggcctcaccttcctcgtcggagccgccctcaacggcgccgcccagaacatcgccatgctcatcatcggacgcatccttctcggcgtcggcgtcggcttcgcaaatcagtccgtgcctgtgtacctgtcggagatggcgccggcgcgtctccggggcatgctcaacatcggcttccagctgatgatcaccatcggcatcctggcggcggagctcatcaactacggcaccaacaagatcaaggccgggtacgggtggcgcgtgagcctggcgctggcggcggtgccggcggccatcatcaccctgggctccctcttcctcccggacacccccaactcgctgctggagcggggccacccggaggaggcacgccgcatgctccgccgcatccgcggcacggacgacatcggcgaggagtacgcggacctggtggcggccagcgaggaggcccgccaggtgcgccacccgtggcggaacatcctgcgccgccggtaccgcgcgcagctcaccatggccgtcgcgatccccttcttccagcagctcacggggatcaacgtcatcatgttctacgcgcccgtgctgttcgacacgctgggattcaagaacgacgcctccctcatgtcctccgtcatcacgggcctcgtcaacgtcttcgccaccgtcgtgtccatcgtcaccgtcgaccgcgtcggccgccgcaagctgttcctccagggcggcgcgcagatgatcgtgtgccagctcatcgtgggcacgctcatcgccgccaagttcgggaccagcggcacgggggacatcgccaagggctacgccgcggtcgtcgtggtcttcatctgcgcctacgtcgccggcttcgcctggtcgtgggggcccctgggctggctcgtgccgtccgagatcttcccgctggagatccgcccggcggggcagagcatcaacgtctccgtcaacatgttcttcaccttctgcatcgcgcaggccttcctcaccatgctctgccacttcaagttcggcctcttctacttcttcgccggctgggtcgtcatcatgaccgtcttcatcgccttcttcctgcccgagaccaagaacgtgcccatcgaggagatggtgcttgtctggaagtcacactggttctggaaaaggttcatcgccgacgaggacgtgcacgtcggcattggcaacaaccacccggccaaaaacggcagcgacaccaagggggccgacgcgtgaacgtgatctcaacatctatattccatctacagtcacaactgaaatgtacatttaggcttccattgttccatcaactagtagctacatgtcctcctagtaaagtaccagtgtttgtttgtgtaatgtttgttacgcccattaaattcttcttggattggatgaaaaaaaaaaaaaa

SEQ ID NO: 9922 - protein, 523 aa, Zea mays
  misc_feature: Ceres CLONE ID no. 1568576
  misc_feature: Ceres CDNA ID no. 25445585
  misc_feature (452)..(499): Pfam Name: MFS_1 PFAM Desc: Major Facilitator Superfamily
  misc_feature: Homolog of GI Number: 7446731 NR Desc: hexose transport protein STC
  misc_feature: Homolog of GI Number: 1935021 NR Desc: monosaccharid transport protein
  misc_feature: Homolog of GI Number: 19885 NR Desc: monosaccharid transporter
  misc_feature: Homolog of GI Number: 50953794 NR Desc: monosaccharide transport protein 1
  misc_feature: Homolog of GI Number: 33694268 NR Desc: monosaccharide transporter 6
  misc_feature: Homolog of GI Number: 56112334 NR Desc: monosaccharide transporter 8
  misc_feature: Homolog of GI Number: 30349804 NR Desc: monosaccharide
  misc_feature: Homolog of GI Number: 34915514 NR Desc: putative monosaccharide transport protein MST1
  misc_feature: Homolog of GI Number: 50938349 NR Desc: putative monosaccharide transporter 3
  misc_feature: Homolog of GI Number: 50941657 NR Desc: putative monosaccharide transporter 3
MAGGGIVNTGGGKDYPGKLTLFVLLTCIVAATGGLIFGYDIGISGGVTSMNPFLEKFFPEVYRKKQEAKTNQYCKYDNQLLQTFTSSLYLAALVASFFAATVTRAVGRKWSMLVGGLTFLVGAALNGAAQNIAMLIIGRILLGVGVGFANQSVPVYLSEMAPARLRGMLNIGFQLMITIGILAAELINYGTNKIKAGYGWRVSLALAAVPAAIITLGSLFLPDTPNSLLERGHPEEARRMLRRIRGTDDIGEEYADLVAASEEARQVRHPWRNILRRRYRAQLTMAVAIPFFQQLTGINVIMFYAPVLFDTLGFKNDASLMSSVITGLVNVFATVVSIVTVDRVGRRKLFLQGGAQMIVCQLIVGTLIAAKFGTSGTGDIAKGYAAVVVVFICAYVAGFAWSWGPLGWLVPSEIFPLEIRPAGQSINVSVNMFFTFCIAQAFLTMLCHFKFGLFYFFAGWVVIMTVFIAFFLPETKNVPIEEMVLVWKSHWFWKRFIADEDVHVGIGNNHPAKNGSDTKGADA

SEQ ID NO: 9923 - DNA, 1899 bp, Zea mays
  misc_feature: Ceres CLONE ID no. 1569911
  misc_feature: Ceres CDNA ID no. 25445684
  CDS (297)..(1565): REFERENCED BY SEQ ID NO: 9924
acctagaaaaaacggcctagtttcacctcccccattcccttggaattggatttgctcccgaatccggcgaggaagcgaccggcactccacgccacgccgcggcgcccaaggaagggaagcttggggccctaggcctcgtctccatccccgccgcagccggcgcgaggcggcgcggcacgagcacgacggtcaccatcagccaccgcgcgatcccgggggacggccaggccagattccacaacgttttactcttattaaactccccaacttcgtctaaggaagcaagtgatttcattatgaaagactggtctattttctccaaactcgatcacaatggaggttacctccccaggttcccaatagactctccaatatctcatgatattgggttacgattggtatcgcaagtcggaaacttagttgagtgttcatttcaacatccaaggcatatatgtgctacggggagtggagctgttcaggaagcattcagctgtttcaacaagtttgctggagctttctatttctggttttctagagcatcgaatcctaagttattccaaaggctatcagctgctgcaggctcaagttcaagagcttgtcggtcacacataaagcaagtgacctcttgcttgcagcatttacctggactggagtttggttcacaattaagagaagatcatgctgtacaagtgcttttagcaaggcttgcaagcgcaacttttggacgcctgtggacagaggtggaggagcgacatgcctgcaacatccttatgctggctgctgctactgtaattccaccatttgaaaacatatcaccaaagatgctggctgcgtcaatggcactaagaaaagatcgtggaaacatagagcctactgaacaatcttattcagaggaaaaccgtccaggttgtgtgtgtgttgctgtgccaagagtactcttaccagaagatgcaacggaaccaacaactggcatcaaattccccactgtactcgaagacaattccaatctgactacagaggtccttgttggaatgggttttagaagcatgcgaataatgagggtcaaaaatctgaatctttatgcctttggattatatatacaacctgattctgtctgcaagaagctgggtccaaagtacgcttatattccagatgctgagttaaaggatcacccagatttctatgaagatcttctgagggaaaatattgatatgactgttaggctagtagtaagctacaatggtctcagcattggcacagttcgagatgcatttgagaagtctcttggcttccggttgcaaaagatgaatcctaatactgattatggttgcttgaagacatttggttcttgttttagtgaagacattcgtatacctgctattgacttccggcaaacatctgatggccagctaataactgaaattgatggcaaacaaattggcactgtccagagcaaagatctttgcagagccttcttcgatatgtatattggtgaccccccagtttcagtggagaccaaacaagacattgcgcaaaatgtggctggactcataagaagatgctagggaaacgggaaaactaaatcgaagaacctggaattatttcattcatctatacaaggagaggacatataaacagaaaggaagccaggagaggatcgattgtatttatagtggtagactgtctttgtaagctataaacataaagcatatgcttggcaaaggcctccatgcctttcatatggtttggcattttcgccatttcctggctggctggcgtgctgtatcatgtctacaaatatatgatacagtaaaaagttgtacaacaagagcatgtttctgtaccccaagtgaaaaatgacggggttcagctttgttcatgcaaaaaaaaaaaaaaaaa

SEQ ID NO: 9924 - protein, 422 aa, Zea mays
  misc_feature: Ceres CLONE ID no. 1569911
  misc_feature: Ceres CDNA ID no. 25445684
  misc_feature: Homolog of GI Number: 33867695 NR Desc: putative chalcone isomerase
MKDWSIFSKLDHNGGYLPRFPIDSPISHDIGLRLVSQVGNLVECSFQHPRHICATGSGAVQEAFSCFNKFAGAFYFWFSRASNPKLFQRLSAAAGSSSRACRSHIKQVTSCLQHLPGLEFGSQLREDHAVQVLLARLASATFGRLWTEVEERHACNILMLAAATVIPPFENISPKMLAASMALRKDRGNIEPTEQSYSEENRPGCVCVAVPRVLLPEDATEPTTGIKFPTVLEDNSNLTTEVLVGMGFRSMRIMRVKNLNLYAFGLYIQPDSVCKKLGPKYAYIPDAELKDHPDFYEDLLRENIDMTVRLVVSYNGLSIGTVRDAFEKSLGFRLQKMNPNTDYGCLKTFGSCFSEDIRIPAIDFRQTSDGQLITEIDGKQIGTVQSKDLCRAFFDMYIGDPPVSVETKQDIAQNVAGLIRRC

SEQ ID NO: 9925 - DNA, 829 bp, Zea mays; identical to SEQ ID NO: 1333
  misc_feature: Ceres CLONE ID no. 1570282
  misc_feature: Ceres CDNA ID no. 29191368
  CDS (204)..(356): REFERENCED BY SEQ ID NO: 9926

SEQ ID NO: 9926 - protein, 50 aa, Zea mays; identical to SEQ ID NO: 1334
  misc_feature: Ceres CLONE ID no. 1570282
  misc_feature: Ceres CDNA ID no. 29191368

SEQ ID NO: 9927 - DNA, 2537 bp, Zea mays
  misc_feature: Ceres CLONE ID no. 1570674
  misc_feature: Ceres CDNA ID no. 25445713
  CDS (316)..(2004): REFERENCED BY SEQ ID NO: 9928
agtcactgacttgtgggcccagaggccaaagcgcgcactgcccatcaccgtctcctgaatctcagaaccttatcccctcctttgctccatccctctcctctcttcctcggcgacctccacgccggtctagagccggcagcgctgcggcggagcaccaaccgagctccgatcccaccccgctcccaaccgcgcggccctgtccatggcgcgcgcggtgcggcggcgagcccccatgcattcccgccgccggagcgcggcctgctaagcgacgacaattcctctccctctcctaaatccactcccccacgtgtcttcatgggccctccggcctacaccgcctccccctgcacggggtctgccctcttctccaacacccgagcgccgccgccgccaccgcggcttcttatccgatggggcccggggccgccgtcggccgtggggaggcacggaggccgcgtaactccgtcgcaggagaggcgcggccccgccccgtcgcaggagaggcgccgccccacggagtcttcgtcccagtctcaccagctccaggaacggaagcggcactggaaggcgggggagttcccggggaccgctgccgatggaggaggtggcggcggaaggcgccccgcactagggaaccggcattcgaaggccggggagtttcccgggacggacggcggccgtcccgctcccgcgccgccgcaggggaagcggcactggaaggccggcgagtttccgggcgccgccgccgcccccggttcggggacgccgaggactcccctcaagaacgtcaagaagcggctggacgcccgcgcggacgctaaggcgtgggcgtgcaccgtcaccgaggccctcgcggaccgcgtcagctccaagaactggcaagaggcgctccaggtctttgagatgctcaaggagcagccgttctaccatcccaaagagggcacctacatgaagctcatcgtgctgctgggccgctcagggcagccgacccgggcacaccaactcttcgacgagatgttgcagcaaggatgccagcccacccccgagctctacaccgccttgattggggcctactgccgaagctgcctactggacgaggcgctccagctcctcaacgacatgaagagctcccctttatgccagcctgatgtctacacctacagcaccatcatcaaggcctgcgtcgacgctgccaggttcgacctcaccgacaccatgtacaaagacatggcggagcgctccatatcacccaacacggtcacgcagaacatcgtcctcagcggctacgggaaggccgggcggctggacgacatggagcgagtgctctccgacatgctcgacagcgtgtcatgcaaaccggacgtctggaccatgaacatcatcctcagcctcttcgggaaccggggcgaggttgagctgatggagagatggtacgagaagttccgagggtacggggtcgagccggagacccgcacgctgaacatcctaatcggcgcctacgggaagcggcggatgtacgacaagatgtccgcggtcatggagcacatgcgcaagctcgcgttcccgtggacgaccgcgacgtacaacaacgtgatcgaagcgtttgccgaggccggcgacgccgggaacatggagcacgcgttcaaccagatgcgttccgagggcatgaggccggacactaagaccttctgctgcctgatcgacgggttcagcagggcaggccaattccataaggtggtaggcatggtgaagctcgccgagaggctcgacgtgcccgtgaacacgcctttccacaacgctgttcttggcgcgtgcgctagagcggatgatcttgtggagatggagagggtgttcaggcgcatgaagcatacgcagtgcgagcctgatgcttcgacgtactctatcttggtggaggcttatcgcaaggagggaatgaccgacaagatctatgctctgcatcaggagaacccggctctggttccagctgattttgtcatggtttgaatgacccagtgacttgagtcacggtccagaaattttagagcttggttgcattggttgagaatcttcttgctatccaccaaacagagtggcggccattcttcaactccattttttgttgtctgttggtatgcagagctagtatagacgtctcctccaactcaagggtggtgaaagtgctgtcagcaacgtacgggtattgatctagtttgatatattccaagaaaaacaaagaccaatgcatgagaagatggacaatgtgacacagaataatctctggaaaatagatacctggaagcatcctcgtcaaacaagactattatgaagactacaaaagccgcccgcccgttcgacagcgagctataaagtgacggaagcttcctatagtacccactgagggcctgtctggaacacgatttttcccctctgttcctgcgtttttcatgcacaaataaatctgagctgatttccgtgaattttatatgcgaaccccttgaaattcatgtgttccaaaaaaaagaaaaaaaaaaaaaaaa

SEQ ID NO: 9928 - protein, 562 aa, Zea mays
  misc_feature: Ceres CLONE ID no. 1570674
  misc_feature: Ceres CDNA ID no. 25445713
  misc_feature (456)..(490): Pfam Name: PPR PFAM Desc: PPR repeat
  misc_feature: Homolog of GI Number: 30961817 NR Desc: PPR2
  misc_feature: Homolog of GI Number: 55773690 NR Desc: putative PPR2
  misc_feature: Homolog of GI Number: 6630737 NR Desc: nodulin / glutamate
  misc_feature: Homolog of GI Number: 22128589 NR Desc: fertility restorer
  misc_feature: Homolog of GI Number: 22128591 NR Desc: fertility restorer
  misc_feature: Homolog of GI Number: 50251963 NR Desc: putative pentatricopeptide
  misc_feature: Homolog of GI Number: 15218325 NR Desc: pentatricopeptide
  misc_feature: Homolog of GI Number: 15229587 NR Desc: pentatricopeptide
  misc_feature: Homolog of GI Number: 50938865 NR Desc: putative pentatricopeptide
  misc_feature: Homolog of GI Number: 10177016 NR Desc: maize crp1 protein
MGPPAYTASPCTGSALFSNTRAPPPPPRLLIRWGPGPPSAVGRHGGRVTPSQERRGPAPSQERRRPTESSSQSHQLQERKRHWKAGEFPGTAADGGGGGGRRPALGNRHSKAGEFPGTDGGRPAPAPPQGKRHWKAGEFPGAAAAPGSGTPRTPLKNVKKRLDARADAKAWACTVTEALADRVSSKNWQEALQVFEMLKEQPFYHPKEGTYMKLIVLLGRSGQPTRAHQLFDEMLQQGCQPTPELYTALIGAYCRSCLLDEALQLLNDMKSSPLCQPDVYTYSTIIKACVDAARFDLTDTMYKDMAERSISPNTVTQNIVLSGYGKAGRLDDMERVLSDMLDSVSCKPDVWTMNIILSLFGNRGEVELMERWYEKFRGYGVEPETRTLNILIGAYGKRRMYDKMSAVMEHMRKLAFPWTTATYNNVIEAFAEAGDAGNMEHAFNQMRSEGMRPDTKTFCCLIDGFSRAGQFHKVVGMVKLAERLDVPVNTPFHNAVLGACARADDLVEMERVFRRMKHTQCEPDASTYSILVEAYRKEGMTDKIYALHQENPALVPADFVMV

SEQ ID NO: 9929 - DNA, 2064 bp, Zea mays
  misc_feature: Ceres CLONE ID no. 1570884
  misc_feature: Ceres CDNA ID no. 36698452
  CDS (72)..(1775): REFERENCED BY SEQ ID NO: 9930
agtgcggccgtgccaagtcaaagtcgcacctcagctctgccgaggttggcattggtggtggtgacccggcgatggcggcggagcgggacatcgacgacctgccgcggaacgacgccaactacacggcgctcacgccgctctggttcctcgagcgcgccgcgctgacccacccggccagggcctccgtcgtgcacgggcccgtgcgctacacctgggccgacacctacagccgctgccgccgcctcgcctccgccctcgcgcgcagatccgtcggccacggaagcacggtagctgtaatagccccaaacatccccgcgatctatgaagctcattttggagtgcccatggctggggcagtggtcaactgtgtcaacattcgactaaatgctgccactgtagcatttctcttggagcactcctcagcagaagttgtcatggttgaccaagaatttttcaccctggcagaggattctttgaggattatcgcagataaaaagaaaggcacttttgaacagccacttctaatagttattggtgacgcaacttgcgatccaacaaccctccaagacgctttgagaaaaggagccatcgattatgaggcattcttggaaagtggagatcctgaatttgcttggagaccaccacaggatgaatggaagagtatcgcgctaggttatacttctgggacaacttctaacccaaagggtgtggtattgcatcacaggggggcttacctaatgtcactgagtggtgctttgatatggggaatgaacgaaggcgctgtttacttgtggactttgccaatgttccattgcaacggttggtgctatacatggacacttgctgctctctgcgggacaagcatatgtcttcgtcaggtttcagcgaaggccatcttctcagctatagccaacgagggcgtgactcacttctgtggggcaccggtcgtcctgaacaccatcatcaacgcccctccagccgacacgattctccccctacctcgtgtcgtcaacgtcatgaccgctggcgctgctccgccaccctctgtcctggcggcaatgtcgaagcttgggttccgcatcactcacacctacggcctgtcggagacctatggaccatccacggtgtgcgcctggaagccggaatgggacaggctgccagccgacgagcgcgcccggctccacgcgcgtcagggcgtccgttacgtgggcctggagggcctggacgtggtggacccgaagacgatgacgccggtcccggccgacggcaccacgatgggggagatcgtgatgcgcgggaacggcgtcatgaaggggtacctgaagaacccggaggcgaacgcggaggcgttcgagaacgggtggttccactcgggcgacctgggcgtgcggcacggcgacgggtacgtcgaggtgagggaccgcgccaaggacatcatcatctccggcggggagaacatcagcagcctggaggtggagaaggcggtgtacctgcacccggcggtgctggaggcgtcggtcgtggcccgcgccgacgagcggtggggggagtcgccgtgcgcgttcgtgacgctcaaggacgccgtggaccgctccgacgaggcggcgctggcgcgggacatcatgcggttctgccgcgagaagctgcccggttactgggtgcccaagtccgtggtgttcgggccgctgcccaagacagcgaccggcaagatcaagaagcatgagctcagggccaaggccaaggaactgggcccggtcgggaagagcaggatgtgatcgagcctcgagctcgtcttgctttgctacactgtactattcgtaggatggatggaagttgtatactacagactacagtgcaaactgcgtttcttctgtataacaccactactgtacgaacaatacagtcgtgtctgagcttttcttttgccagtgaggactgaactttgtatgaagtatgaactcgcgaagggcgctgcaacactgctcccacttgtatattccaaatttccaagggtacagtaatggcaagacagttaagaagttgcccaaaaaaaaaaaaaaaaaa

SEQ ID NO: 9930 - protein, 567 aa, Zea mays
  misc_feature: Ceres CLONE ID no. 1570884
  misc_feature: Ceres CDNA ID no. 36698452
  misc_feature (47)..(483): Pfam Name: AMP PFAM Desc: AMP
  misc_feature: Homolog of GI Number: 68343830 NR Desc: AMP
  misc_feature: Homolog of GI Number: 26990265 NR Desc: AMP
  misc_feature: Homolog of GI Number: 7670021 NR Desc: AMP
  misc_feature: Homolog of GI Number: 56677319 NR Desc: AMP
  misc_feature: Homolog of GI Number: 67157301 NR Desc: AMP
  misc_feature: Homolog of GI Number: 82946441 NR Desc: Acyl
  misc_feature: Homolog of GI Number: 23013752 NR Desc: COG0318: Acyl
  misc_feature: Homolog of GI Number: 32039408 NR Desc: COG0318: Acyl
  misc_feature: Homolog of GI Number: 48764088 NR Desc: COG0318: Acyl
  misc_feature: Homolog of GI Number: 20799723 NR Desc: adenosine monophosphate binding protein 7 AMPBP7
MAAERDIDDLPRNDANYTALTPLWFLERAALTHPARASVVHGPVRYTWADTYSRCRRLASALARRSVGHGSTVAVIAPNIPAIYEAHFGVPMAGAVVNCVNIRLNAATVAFLLEHSSAEVVMVDQEFFTLAEDSLRIIADKKKGTFEQPLLIVIGDATCDPTTLQDALRKGAIDYEAFLESGDPEFAWRPPQDEWKSIALGYTSGTTSNPKGVVLHHRGAYLMSLSGALIWGMNEGAVYLWTLPMFHCNGWCYTWTLAALCGTSICLRQVSAKAIFSAIANEGVTHFCGAPVVLNTIINAPPADTILPLPRVVNVMTAGAAPPPSVLAAMSKLGFRITHTYGLSETYGPSTVCAWKPEWDRLPADERARLHARQGVRYVGLEGLDVVDPKTMTPVPADGTTMGEIVMRGNGVMKGYLKNPEANAEAFENGWFHSGDLGVRHGDGYVEVRDRAKDIIISGGENISSLEVEKAVYLHPAVLEASVVARADERWGESPCAFVTLKDAVDRSDEAALARDIMRFCREKLPGYWVPKSVVFGPLPKTATGKIKKHELRAKAKELGPVGKSRM

SEQ ID NO: 9931 - DNA, 1839 bp, Zea mays
  misc_feature: Ceres CLONE ID no. 1571410
  misc_feature: Ceres CDNA ID no. 29191345
  CDS (109)..(1599): REFERENCED BY SEQ ID NO: 9932
aaaaactccgatacgcggggatgcataggcgtcggcaggaggagctcatgtcgaacaccaatagcgttagccgttagccaccaccagtaggcagtagccacagcagtcatggggtcggtgccgccggcagagggggacaggcgccagccccagcagcagccgcacgtgatgatgatcccgtacccggcgcagggccatgtcacgccgatgctgcagctggccaagctactccacacacgcggattccacgtcaccttcgtcaacaacgagttcaaccaccgtcgccacctgcgcgcgcgggggccgggcgcgctccacggcgccccggggttccgcttcaccgccattgacgacggccttccgccctccgacgccgacgccacccaggacgtccccaagctctgctactccaccatgaccacctgcctaccccggttcagggacctaattgtcaggaccaatgccgaggccgaggccgagggacgccccgccgtgacgtgcgtcgtcgccgacagcatcatgagcttcggcctccgcgccgcgcgggagctcggtctccgctgcgccacgttctggaccgccagcgcctgcggcttcattggctactactactaccgccacctcgtcgcacggggtatcgtcccgcttaagaatgaagcgcagctcaccgacgggtacctggacaccgtcgtcgactggatcccttgcgcgcccaaggacctgcagctccgggacttcccgagctttgtgcgcaccacggacccggacgacatcatgctcaacttcttcatccacgaggtagaggcgatgtcgcaggcgtcggcggtggtcatcaacacattcgatgatctcgacgcgacgctgcttcacgccatggcgaagctcctgtcccggcccatctacaccgtgggcccgctcctgctgacggtgcgaaacaacgtccccgcggacagccccgtcgcggccatcgggtccaacctatggaaggaacaagaggcgccgctccggtggctcgacggccgcgcgccgcgctcggtcgtgtacatcaacttcgggagcgtcacggtgatgtccaacgagcagctggtcgagttcgcgtgggggctggccaacaccggctacacattcctctggaacgtgcgcccggacctcgtcaagggcggcgactccgccggcgcggggctgccaccggagtttctggccgcgacggagggccggagcatgctgtcgacgtggtgcccgcaggcagaggtgctggagcacgaggccgtggggttgttcttgacgcactccgggtggaactccacgattgagagcatctgtggcggcgtgcccatggtgtgctggcccttcttcgctgagcagcagaccaactgccggtacaagcgcaccgagtggggcatcgggatggagatcggtaatgacgtccggcggggcgaggtgacggcgctcatacgggaggccatggagggggagaaagggcgggacatgcgccgccgcgtcacggagcttaaggggagcgccgtggccgcggcgaagctcaacggacgctctatgcgcaacgtggacaggttcatcgacgaggtgctcctagcttgagcattaagggttttttttacaatggtggccttagttttgcctctgtactcaagtctactcttatttttgcttcttcctcggttttacccaccatccagccgtccactgccttgcttagatcaaggctcgcacgccgtgtcccccactgttatgttatgaaaacaaaaacggtaattttcagataccgaaaatcgttttcgaaattttatcaagatttaggtctaaaaaaaaaaaaaaaaa

SEQ ID NO: 9932 - protein, 496 aa, Zea mays
  misc_feature: Ceres CLONE ID no. 1571410
  misc_feature: Ceres CDNA ID no. 29191345
  misc_feature (308)..(431): Pfam Name: UDPGT PFAM Desc: UDP
  misc_feature: Homolog of GI Number: 50922975 NR Desc: OSJNBa0054D14.2
  misc_feature: Homolog of GI Number: 50924628 NR Desc: OSJNBa0086B14.13
  misc_feature: Homolog of GI Number: 50922933 NR Desc: OSJNBb0026L04.11
  misc_feature: Homolog of GI Number: 50922923 NR Desc: OSJNBb0026L04.6
  misc_feature: Homolog of GI Number: 50922925 NR Desc: OSJNBb0026L04.7
  misc_feature: Homolog of GI Number: 50922997 NR Desc: OSJNBb0033P05.7
  misc_feature: Homolog of GI Number: 50922999 NR Desc: OSJNBb0033P05.8
  misc_feature: Homolog of GI Number: 50909849 NR Desc: putative UDP
  misc_feature: Homolog of GI Number: 50945531 NR Desc: putative glucosyltransferase
  misc_feature: Homolog of GI Number: 50909841 NR Desc: putative glucosyltransferase
MGSVPPAEGDRRQPQQQPHVMMIPYPAQGHVTPMLQLAKLLHTRGFHVTFVNNEFNHRRHLRARGPGALHGAPGFRFTAIDDGLPPSDADATQDVPKLCYSTMTTCLPRFRDLIVRTNAEAEAEGRPAVTCVVADSIMSFGLRAARELGLRCATFWTASACGFIGYYYYRHLVARGIVPLKNEAQLTDGYLDTVVDWIPCAPKDLQLRDFPSFVRTTDPDDIMLNFFIHEVEAMSQASAVVINTFDDLDATLLHAMAKLLSRPIYTVGPLLLTVRNNVPADSPVAAIGSNLWKEQEAPLRWLDGRAPRSVVYINFGSVTVMSNEQLVEFAWGLANTGYTFLWNVRPDLVKGGDSAGAGLPPEFLAATEGRSMLSTWCPQAEVLEHEAVGLFLTHSGWNSTIESICGGVPMVCWPFFAEQQTNCRYKRTEWGIGMEIGNDVRRGEVTALIREAMEGEKGRDMRRRVTELKGSAVAAAKLNGRSMRNVDRFIDEVLLA

SEQ ID NO: 9933 - DNA, 2320 bp, Zea mays
  misc_feature: Ceres CLONE ID no. 1571552
  misc_feature: Ceres CDNA ID no. 40041477
  CDS (292)..(1935): REFERENCED BY SEQ ID NO: 9934
aactcccgcccacaccgccgcgcccccagcgcctgcccgcgccagccaggtgcgccctcgcctcagcccgcgtcggcaaggcgcactcccgcccctgcccgctccggccaggtgcgccctcgcctcagcccgcgccggcaaggcgcacccccgcctcagcccgcgcatggcagaaatgtatttctgactcctttcagtttacttccctgaccaccttgcttctaccgaagagtttccacgtcactgcaaaatcacttgtccctcaaaccctcctatcagaaccacgattcgatgcatcgccttgcccgcccagtctacaccctgctcaactcctccatgaggagtggtccctgcgggctcgccacggacgcacaagggctgttcaacggaatgcctccaccgaaactgccaagccacgcgctgtttggccatgcctgccaggtgctcggccgaacacacgtttcacagttttgtaccgtggctcggcagtccacggatgagcgcgctagtgcagagccactgcgattcacagtcacaccgggtgacgcctttggggatggcccgcctgtgggcatgtcagaggctgctaagatggtgtgtcgtattgtatccacgcagccagaaccaaagatcgcgtcgacacttgatgcgcttggggtggccgtgtccccagagctggtagctgaagtgctcaagaacttgagcaatgctgggatgttagcacttgccttcttccgctgggcagagaggcaggagggcttcagttacacggctgagggcttccacaacctgattgaggcgctgggaaagatcaagcagttcaggctggtgtggagcttggtggagaccatgcggtgccggggcttgctatctaaggacacattcaagctcatagtccgaaggtacgctcgggctagaaaggtcaaagaggctgttgagacattcgagaagatgagcatttttgggcttaaaactgagttatcagattacaactggctgattgacacgctaagcaaatccaaacaagtgaagaaggcgcaagccatctataaggagatgaagaggaagggtaagtttgtacctgatttgaaaacctacactgtcctcatggaaggttggggccatgagaaagatctgttgatggtgaaaacaatgtaccaagaaatgattgatgctggcatcaggcctgatgttgttgcctacgggatgctgattagcgccttctgcaagtctggcaaatgtgatgaggccatcaaggtgttctacgagatggaagcaagtggttgcatgccaagtcctcatgtctactgcatgcttatcaatggccttggctcggaggagaggcttgatgaagctttgaagtactttgagcattacaagaaaagtgggttccccatggaggtgcctacttgcaatgcggtagttggagcttactgcagagcctcgaagtttcagcatgctttcaagatggttgatgagatgaggaagtgtaaagttggcccaaattcccgtacttatgatgtgattcttcattatctgataaaatcacagaaatttgaggaggcttataatatattccagaggatgggaatcgacggctgtgagcctcagctcaatacatatacaatgatggttggcatgttctgtagtaacggacgagttgatatggcattaaaggtgtggaagcaaatgggggagaaaggtgtcctcccatgtatgcatatgttttcggcattgatcaatgggttatgcttcgagaaccggctcgaagaggcttgtgtatattttcaggagatgctggacaaaggaattaggccacctggtcagcttttcagtaatttgaaggaagctcttgttcaaggtgggagaataagtttggcacaagaggtggctttgaagttggacgcgataaggaaaacaccttttcgtggttaaagaagttttgttcataaaaacaatgtagcacctggagcattacagtcacaatgtttgggcataccagtagctccagcaatgggagaaagcaatgtgtatatcagatcacaaaaacaaacattggatatcggctgaagtctttgcatgacaacgtgatgtactcatgtagctcctgctacttctatttactcatgagaaaatgtatggtgcaatcaaaataataaaagcaaaccaaactaaatgttcctcttggcagaagaacaagccttcggtcattgctgtttctggaacagatcatttcttgcagtttacccctaattctccattcactgtcatttcatactgcagcttacattgcccaaaaaaataaaaaaaaaaaaaaaaa

SEQ ID NO: 9934 - protein, 547 aa, Zea mays
  misc_feature: Ceres CLONE ID no. 1571552
  misc_feature: Ceres CDNA ID no. 40041477
  misc_feature (196)..(230): Pfam Name: PPR PFAM Desc: PPR repeat
  misc_feature: Homolog of GI Number: 56201654 NR Desc: pentatricopeptide
  misc_feature: Homolog of GI Number: 15228788 NR Desc: pentatricopeptide
  misc_feature: Homolog of GI Number: 15218325 NR Desc: pentatricopeptide
  misc_feature: Homolog of GI Number: 50251963 NR Desc: putative pentatricopeptide
  misc_feature: Homolog of GI Number: 50912985 NR Desc: pentatricopeptide
  misc_feature: Homolog of GI Number: 15221610 NR Desc: pentatricopeptide
  misc_feature: Homolog of GI Number: 6630464 NR Desc: F23N19.4
  misc_feature: Homolog of GI Number: 15242446 NR Desc: pentatricopeptide
  misc_feature: Homolog of GI Number: 50935497 NR Desc: putative pentatricopeptide
  misc_feature: Homolog of GI Number: 15221549 NR Desc: pentatricopeptide
MHRLARPVYTLLNSSMRSGPCGLATDAQGLFNGMPPPKLPSHALFGHACQVLGRTHVSQFCTVARQSTDERASAEPLRFTVTPGDAFGDGPPVGMSEAAKMVCRIVSTQPEPKIASTLDALGVAVSPELVAEVLKNLSNAGMLALAFFRWAERQEGFSYTAEGFHNLIEALGKIKQFRLVWSLVETMRCRGLLSKDTFKLIVRRYARARKVKEAVETFEKMSIFGLKTELSDYNWLIDTLSKSKQVKKAQAIYKEMKRKGKFVPDLKTYTVLMEGWGHEKDLLMVKTMYQEMIDAGIRPDVVAYGMLISAFCKSGKCDEAIKVFYEMEASGCMPSPHVYCMLINGLGSEERLDEALKYFEHYKKSGFPMEVPTCNAVVGAYCRASKFQHAFKMVDEMRKCKVGPNSRTYDVILHYLIKSQKFEEAYNIFQRMGIDGCEPQLNTYTMMVGMFCSNGRVDMALKVWKQMGEKGVLPCMHMFSALINGLCFENRLEEACVYFQEMLDKGIRPPGQLFSNLKEALVQGGRISLAQEVALKLDAIRKTPFRG

SEQ ID NO: 9935 - DNA, 2353 bp, Zea mays
  misc_feature: Ceres CLONE ID no. 1571902
  misc_feature: Ceres CDNA ID no. 40041478
  CDS (2)..(1720): REFERENCED BY SEQ ID NO: 9936
agtcgagagtgccgggatcctaacacccatgctcgccgtggccgcgtccctcagggcctcggcctccgcggtggccgaagctggcggcgacccggccgttcttcacgcggtcctcatcaagaccgcctcgtcctctcgcgccgcctacaacctcctcttctcccgctaccatccgtcgctctcgctgcacctcctctcccacctcccgttctgcttccgtcccaccgccagctcgctcacttcctcgctctcctccctctccgcttcctccccggcctccgcgctcccgctcctccgccgcgtcctcggcatgtcccctgctctcctctgcgacggcccgctatcctcactcctccgctccatgccgccgtccatcgcaccgcacgtgcacgccctcgccttcaagctcgccctctcgtcgtccccctactccgcctcttgccttattactctctactccagagcccgctccccggcatgcgcccgccacctgttcgacgaaatccccgttgcaaatcgggaccccgtttgctactcctccacgattgttgggctcgcacagaacgggtggtacgaagaatccctctctgtgttcgctggcatgcgcgcaaatggtgttgattctaccatgcatgcgctctccggttctctccgggcagctgcagggcttgctgtgctggagcagacttgtgggattcacgcccatgcggtggtagttgggcttgatggaaatgtggctgttgggaccgccctggtggatgcttatggtaaggctggagatgtggatgatgcagctaaggtatttgaggggttgggtggtgaccgaaacctgattacatggaacgcggtgctttctgctcatgctcagcagggagatgtgcaggaggtcactggactgtttaaccagatgatggagctgggttttgctcctgatgggctaacattccttgctgttctcacgtcatgtagtaatgccggagcagccactgaagccaagttttggttggaagcaatgcagtcgaagtacggtgtgaagcctgaccttgagcattatacttgcgtggtgggtgcaatggcacgggtggggcatctagaggatgcagagagttttgcttgtacaatgccatgcaaaccagatgcagcagtgtggcggacacttctaatgggctgtgtggttcaccgcagggttgacatggcagaatccatgggacagaggcttctggagattaatcccaaggatgactcagcttatgtcatgcttgccaacgtctactcaacagctgggaaaacagatgaggaggctgaggcatggactgcaatgagggaccatggggtcaggaaggaaggtgggcgaagttggattgaggtcagagggctggtacatgtttttgttgcaaacgaaagaaggcatgaacagctgctagaaatatatgacaaactgcatgaattgattcaagaggtagagaagttagggtacaaggaggcagatgagagactttggcatcatagtgaaagattggctcttgcatatgggttgatcagtggtgctgcaccatcaggaaaggtgttgagaatagttaagaacttgagaatatgtgctcattgtcatgaattcttcaagtatgctagcatggtgatcgacagagtaattgtagtacgggatgtcaataggtaccacacaattaagaaaggtgattgcagttgcagaggctgctggtgaaacacatatatcttgaggataaactatgaggcaagaagcatctgtatgattttcggataatccacgagataattgactccaggaaaaaaactcactgcaggattgattggaatttgggaacttgcttggagttgttgccatagggccaacttccctacatgtttgaaatcttgaagagaactgtggtcttatggtgttgcagacaccataatatcttgtttggatagacaccgaagcatcttgttactcgtggagcataaattaacatggcaagtgatgctctttaagtgtcaattattctggggaacatttcgtgcctgctgattaacagtttgagttctcagagatgccccagctcaatagttgcttcttggtcttgtcttggggctgttatgctcatcttgttcggtgacataaactgctgagaggaaagtaccattcctcagttgatccatagtcggtagcatccgattgattcttctctccctttgtttatgattgtttgggttttcatagtttttttcctttttattatgacttagttatttttttcctttctattatgacttaattgaaattaagtggatacagtgaaaaaagttcagctggactaaagaaaaaaaaaaaaaaaaa

SEQ ID NO: 9936 - protein, 563 aa, Zea mays
  misc_feature: Ceres CLONE ID no. 1571902
  misc_feature: Ceres CDNA ID no. 40041478
  misc_feature (167)..(197): Pfam Name: PPR PFAM Desc: PPR repeat
  misc_feature: Homolog of GI Number: 78183583 NR Desc: PPR1106
  misc_feature: Homolog of GI Number: 4582435 NR Desc: putative selenium
  misc_feature: Homolog of GI Number: 28392910 NR Desc: putative selenium
  misc_feature: Homolog of GI Number: 34911828 NR Desc: selenium
  misc_feature: Homolog of GI Number: 77553706 NR Desc: selenium
  misc_feature: Homolog of GI Number: 37534806 NR Desc: putative PPR
  misc_feature: Homolog of GI Number: 34909302 NR Desc: OJ1529_G03.13
  misc_feature: Homolog of GI Number: 42566761 NR Desc: pentatricopeptide
  misc_feature: Homolog of GI Number: 54695180 NR Desc: PPR986
  misc_feature: Homolog of GI Number: 50938657 NR Desc: selenium
MLAVAASLRASASAVAEAGGDPAVLHAVLIKTASSSRAAYNLLFSRYHPSLSLHLLSHLPFCFRPTASSLTSSLSSLSASSPASALPLLRRVLGMSPALLCDGPLSSLLRSMPPSIAPHVHALAFKLALSSSPYSASCLITLYSRARSPACARHLFDEIPVANRDPVCYSSTIVGLAQNGWYEESLSVFAGMRANGVDSTMHALSGSLRAAAGLAVLEQTCGIHAHAVVVGLDGNVAVGTALVDAYGKAGDVDDAAKVFEGLGGDRNLITWNAVLSAHAQQGDVQEVTGLFNQMMELGFAPDGLTFLAVLTSCSNAGAATEAKFWLEAMQSKYGVKPDLEHYTCVVGAMARVGHLEDAESFACTMPCKPDAAVWRTLLMGCVVHRRVDMAESMGQRLLEINPKDDSAYVMLANVYSTAGKTDEEAEAWTAMRDHGVRKEGGRSWIEVRGLVHVFVANERRHEQLLEIYDKLHELIQEVEKLGYKEADERLWHHSERLALAYGLISGAAPSGKVLRIVKNLRICAHCHEFFKYASMVIDRVIVVRDVNRYHTIKKGDCSCRGCW

SEQ ID NO: 9937 - DNA, 1103 bp, Zea mays
  misc_feature: Ceres CLONE ID no. 1572186
  misc_feature: Ceres CDNA ID no. 25892549
  CDS (102)..(800): REFERENCED BY SEQ ID NO: 9938
aatccgcttgacgctccccactgcgcctaaaaatggccgcgtcccactgaaccaatcgtctgcacatcctcttgctgttgccgctcgctcgccgtgccgcaatggctacggccgtcgcctcccatacgttgctctcctccgccttcgctccgcgccactaccaccgccgcctgacccggaccgcgtccgtggggccgtgccgggccgccccggtgggactggccgtgcggtgcgagaagagcgacaagcagaagaggcagccgctcgccgcgctcgtgccccgcgagcagcgcttcatgttcgagggagacgagctctgcggccccgacatatggaatacaacctggtatcctaaggctgcagatcatgtaactaccgagaagacatggtatgttgttgatgcaacagacaagatcctaggcaggctagcatccaccattgcagtacatatcaggggaaagaatgaacccacttacactcccagtgtagacatgggagcttttgttattgtggtcaatgcagataaggttgctgtttctggtaaaaagcggtcacaaaagctttataggaggcactccggaaggcctggagggatgaaagaagaaacttttgaccaacttcagaaaagaattccagagagaatcattgaacatgcggttcgtggcatgctccccaagggaaggctgggaagaagattatttacccacctcaaggtatacaaagggacagaacatccgcacgaggctcaaaaacctgtcccactcccgatcagggataaaagaatacaaaaaacaggatagagaattcatcgactgaaaaggatgcagtggcgaattcctccccagaaggttttgccctttgtttggaatgctatcctcataaccatgcttctgatcgggggaggggggagtatcaatcctctttgtaattttgatgtttaccaatgcatgaaattcagtcaaatttctgtcaatgagtagtcatgtaatatggtacggtttaaatcaacctaaaatctttattttccagttgaagtttgtaattttgacctcgtatggtatgaagtggcagattgtttccaaaaaaaaaaaaaaaaaaaaaaa

SEQ ID NO: 9938 - protein, 232 aa, Zea mays
  misc_feature: Ceres CLONE ID no. 1572186
  misc_feature: Ceres CDNA ID no. 25892549
  misc_feature (96)..(223): Pfam Name: Ribosomal_L13 PFAM Desc: Ribosomal protein L13
  misc_feature: Homolog of GI Number: 34909522 NR Desc: putative ribosomal protein L13
  misc_feature: Homolog of GI Number: 4836870 NR Desc: 50S Ribosomal protein L13
  misc_feature: Homolog of GI Number: 81483 NR Desc: ribosomal protein L13 precursor
  misc_feature: Homolog of GI Number: 22297652 NR Desc: 50S ribosomal protein L13
  misc_feature: Homolog of GI Number: 53765015 NR Desc: COG0102: Ribosomal protein L13
  misc_feature: Homolog of GI Number: 17231680 NR Desc: 50S ribosomal protein L13
  misc_feature: Homolog of GI Number: 53734865 NR Desc: COG0102: Ribosomal protein L13
  misc_feature: Homolog of GI Number: 67923565 NR Desc: Ribosomal protein L13
  misc_feature: Homolog of GI Number: 46130368 NR Desc: COG0102: Ribosomal protein L13
  misc_feature: Homolog of GI Number: 48374279 NR Desc: 50S ribosomal subunit L13
MATAVASHTLLSSAFAPRHYHRRLTRTASVGPCRAAPVGLAVRCEKSDKQKRQPLAALVPREQRFMFEGDELCGPDIWNTTWYPKAADHVTTEKTWYVVDATDKILGRLASTIAVHIRGKNEPTYTPSVDMGAFVIVVNADKVAVSGKKRSQKLYRRHSGRPGGMKEETFDQLQKRIPERIIEHAVRGMLPKGRLGRRLFTHLKVYKGTEHPHEAQKPVPLPIRDKRIQKTG

SEQ ID NO: 9939 - DNA, 1120 bp, Zea mays
  misc_feature: Ceres CLONE ID no. 1572449
  misc_feature: Ceres CDNA ID no. 25892550
  CDS (102)..(800): REFERENCED BY SEQ ID NO: 9940
aatccgcttgacgctccccactgcgcctaaaaatggccgcgtcccactgaaccaatcgtctgcacatcctcttgctgttgccgctcgctcgccgtgccgcaatggctacggccgtcgcctcccatacgttgctctcctccgccttcgctccgcgccactaccaccgccgcctgacccggaccgcgtccgtggggccgtgccgggccgccccggtgggactggccgtgcggtgcgagaagagcgacaagcagaagaggcagccgctcgccgcgctcgtgccccgcgagcagcgcttcatgttcgagggagacgagctctgcggccccgacatatggaatacaacctggtatcctaaggctgcagatcatgtaactaccgagaagacatggtatgttgttgatgcaacagacaagatcctaggcaggctagcatccaccattgcagtacatatcaggggaaagaatgaacccacttacactcccagtgtagacatgggagcttttgttattgtggtcaatgcagataaggttgctgtttctggtaaaaagcggtcacaaaagctttataggaggcactccggaaggcctggagggatgaaagaagaaacttttgaccaacttcagaaaagaattccagagagaatcattgaacatgcggttcgtggcatgctccccaagggaaggctgggaagaagattatttacccacctcaaggtatacaaagggacagaacatccgcacgaggctcaaaaacctgtcccactcccgatcagggataaaagaatacaaaaaacaggatagagaattcatcgactgaaaaggatgcagtggcgaattcctccccagaaggttttgccctttgtttggaatgctatcctcataaccatgcttctgatcgggggaggggggagtatcaatcctctttgtaattttgatgtttaccaatgcatgaaattcagtcaaatttctgtcaatgagtagtcatgtaatatggtacggtttaaatcaacctaaaatctttattttccagttgaagtttgtaattttgacctcgtatggtatgaagtggcagattgtttcaaaaaaaaaaaaaaaaaaaaaaaaaaaaaaaaaaaaaaaaa

SEQ ID NO: 9940 - protein, 232 aa, Zea mays; identical to SEQ ID NO: 9938
  misc_feature: Ceres CLONE ID no. 1572449
  misc_feature: Ceres CDNA ID no. 25892550
  misc_feature (96)..(223): Pfam Name: Ribosomal_L13 PFAM Desc: Ribosomal protein L13
  misc_feature: Homolog of GI Number: 34909522 NR Desc: putative ribosomal protein L13
  misc_feature: Homolog of GI Number: 4836870 NR Desc: 50S Ribosomal protein L13
  misc_feature: Homolog of GI Number: 81483 NR Desc: ribosomal protein L13 precursor
  misc_feature: Homolog of GI Number: 22297652 NR Desc: 50S ribosomal protein L13
  misc_feature: Homolog of GI Number: 53765015 NR Desc: COG0102: Ribosomal protein L13
  misc_feature: Homolog of GI Number: 17231680 NR Desc: 50S ribosomal protein L13
  misc_feature: Homolog of GI Number: 53734865 NR Desc: COG0102: Ribosomal protein L13
  misc_feature: Homolog of GI Number: 67923565 NR Desc: Ribosomal protein L13
  misc_feature: Homolog of GI Number: 46130368 NR Desc: COG0102: Ribosomal protein L13
  misc_feature: Homolog of GI Number: 48374279 NR Desc: 50S ribosomal subunit L13

SEQ ID NO: 9941 - DNA, 3501 bp, Zea mays
  misc_feature: Ceres CLONE ID no. 1573066
  misc_feature: Ceres CDNA ID no. 40041479
  CDS (507)..(3173): REFERENCED BY SEQ ID NO: 9942
actcttcgtcttcctgctctcgctgagcctgcaggatctgaatccgagctcgctcgcatccactatctgcaggccccacgcgccctgttccttcctcccgctaacaatcgccctgttcccggtttgatccgttgaattctgcccggcgcgcgggggcttgcgggtgcgcaccggaggctgcatcttttcccggccaagattcggtccggtgaggccgttcttggcacgatttcacgggccgtttggccttccctcgccggatttgttccggctccaggcaccaaattccaatcttttcctgctgctgctgcctctgcgacactttattcttctcccccaattagcggcggttagtgtggattctgatttgtaggttcatttcctggtttcctccgtgagcttctgcggttggcgtggttacgccagtccctcgcgatttacatctgtgattcgtttgaaaatctgggagtgtggagatttgggaggtcttctcgctcctgtgctctatgaggagcagcttcctgtcggagtcgccgtgcgacgagcagcgcatccatggatatggtttcaacccgcagtcatggctgcaggtggagcgagggaagctgcccaagtcgtcctactcgccttcctccattgagtcacttatcaagattgctgagccacatgtagtgccattgtataagcctttggattatgttgaggtgctgtcaaggatccacgaggagcttgaacaatgtaggccgagcgagctgccaggcctgtacttggtccagtcccaggtgtttcggggccttggagaagcaaaattgcgccagaggagcctccactctgcctggcgttgtgcaagcagcgtccatgagaaagtcatatttggggcatggttgcggtacgagaagcagggggaggagatcatatctgacgtccttgcatcatgtcagaaatgctgtcgagagtttggtttacttgatgttgcctctgagatgcctgtgcggaattttgaggtaattggttcatgggagacaggctcctcgtctcaagtttcttccatggtaaccttccaagtacaggatggtagggtgacatgtgataggtgcaagattgcgtctttgtcaataccattttgctccatgcttaatggaccgttcaatgagtcacagcttgagcttgttgatttgtcagagaatggtatttcgttggagggcatgagagctgtttctgagtttagttctacatgtagtttaggggatcttcctgtggaaatcttattggagatcctggtgtttgcaaacacattttgttgtgacaggctaaaagatgcttgtgataggaaactggcttcatttgtttcaacaaggcaggatgctgttgagctcatgccgttggcatttgaagaaaatgcgccagttcttgctgcttcttgcttgcaaatttttttacaggaacttcccgattgtctagctgatgatctagtaattagcctcttcttaggtgcaactgcacaacaacaacttatcatggttggacatgcatcctttttgctgtactgcttgcttagtgaagtagcaatgaacattgatccgaggacagaaacaactgtattattgttagagaagcttgtgcagctagcagttacccctactcagaagcaaatagcttttcatcaacttgcatgcattagacttttgagaaaggaatatagtgaagctgaacaccaatttgaggttgccttctctgccggtcatgtgtattcaattgctggtattgctagagtcgctggcattcaaggccaaaaggctttggcttatgagaagctcagttcagtgataacatcaaatttgccactggggtggatgtatctggagaggtctttgtattctgaaggtgatagaaagctggcagaccttgacaaagcaagcgagctggatcctactctcacttacccttacatgtatcgagctgcatccttgatgagaaaaaaagatgctaaacatgccttagaggaaattaaccgactcttgggtttcaagttagcattggagtgcctggagctacggatctgtctatacctggctcttgaagactataagtctgctatctgtgatatccatgcgattcttactctttcacctgattatcggatgttggaaggacgtgtagctgcttccaaaataggcactcttcttggtgcacatgtcgagcagtggaatacggctgagtgttggctacaactttatgagcgctggtcatcagttgatgatattggctccctttcagtgatctatcggatgcttgagtcagatgcagcaaaaggtgtcctctactttaggcaatctttgctgctccttaggttgaactgtcccgaggcagcgatgcgcagtttgcaattggcaaggcatcatgcagcaactgagcatgaacgactagtatatgaggggtggctcttatatgacacggggcactatggggaggccctacaaaaagcggaagaatctatttccattcaaagatcatttgaagctttctttctgaaagcctatgttttggctgattcaggagttgatccttcttattctgcgacagttatctcacttcttgaagatgcattgaaatgcccttcagaccggcttcggaagggtcaggcattgaataaccttggtggtgtctatgttgattgtggaaagttagattcagcagctgattgctatacaagtgcattgaaaattcgacacactagagcccatcaaggtcttgctcgtgtacattttctgaggaacaacagggaagctgcatatgaagagatgacaaagttgatagaaaaagctaaaaacaatgcttcggcttatgagaaacgctcagaatattgtgaacgagaacaaactatgacagatttgcaaacagtgacccaattggatcctttgcgtgtttatccatacagatatcgagcagcagtgctgatggatagccacaaggagaatgatgcaatagcggagctcagccgtgcgatatccttcaaagcggacctgcatttgctgcatctccgtgcggctttccacgagcacattggagatgtacccagcgctctccgtgattgtagagccgccctctccttggacccgaatcaccaggagatgttggagcttcagaaacgtgtgaacagccaagagccctgacacattgtggtgctgtattgtgtattgtacaccacgactcatgccactttggtttgcctcgtgacagacagccttgacctgattcattttttttcgtttttccgttaattaattaatcaatcactgtaatacgaagttttcaggaagaaagtaacagagagcaagagagagaactagttatatgaaagcaggcattgataaagcctttttaactcgatgcctgtggcctctgtagaagtattgtgctaatccctgaactgtatcttgaaaaagtgattcgtgcataatgtatttttcagttctgttctcttaaaaaaaaaaaaaaaaa

SEQ ID NO: 9942 - protein, 888 aa, Zea mays
  misc_feature: Ceres CLONE ID no. 1573066
  misc_feature: Ceres CDNA ID no. 40041479
  misc_feature (711)..(744): Pfam Name: TPR_1 PFAM Desc: Tetratricopeptide repeat
  misc_feature (840)..(873): Pfam Name: TPR_2 PFAM Desc: Tetratricopeptide repeat
  misc_feature: Homolog of GI Number: 51963298 NR Desc: PREDICTED OJ1361_E02.101 gene product
  misc_feature: Homolog of GI Number: 77551650 NR Desc: TPR Domain
  misc_feature: Homolog of GI Number: 46810683 NR Desc: ethylene overproducer 1
  misc_feature: Homolog of GI Number: 70780055 NR Desc: ethylene overproducer 1
  misc_feature: Homolog of GI Number: 46810687 NR Desc: ethylene overproducer 1
  misc_feature: Homolog of GI Number: 79441295 NR Desc: protein binding
  misc_feature: Homolog of GI Number: 79314753 NR Desc: protein binding
MRSSFLSESPCDEQRIHGYGFNPQSWLQVERGKLPKSSYSPSSIESLIKIAEPHVVPLYKPLDYVEVLSRIHEELEQCRPSELPGLYLVQSQVFRGLGEAKLRQRSLHSAWRCASSVHEKVIFGAWLRYEKQGEEIISDVLASCQKCCREFGLLDVASEMPVRNFEVIGSWETGSSSQVSSMVTFQVQDGRVTCDRCKIASLSIPFCSMLNGPFNESQLELVDLSENGISLEGMRAVSEFSSTCSLGDLPVEILLEILVFANTFCCDRLKDACDRKLASFVSTRQDAVELMPLAFEENAPVLAASCLQIFLQELPDCLADDLVISLFLGATAQQQLIMVGHASFLLYCLLSEVAMNIDPRTETTVLLLEKLVQLAVTPTQKQIAFHQLACIRLLRKEYSEAEHQFEVAFSAGHVYSIAGIARVAGIQGQKALAYEKLSSVITSNLPLGWMYLERSLYSEGDRKLADLDKASELDPTLTYPYMYRAASLMRKKDAKHALEEINRLLGFKLALECLELRICLYLALEDYKSAICDIHAILTLSPDYRMLEGRVAASKIGTLLGAHVEQWNTAECWLQLYERWSSVDDIGSLSVIYRMLESDAAKGVLYFRQSLLLLRLNCPEAAMRSLQLARHHAATEHERLVYEGWLLYDTGHYGEALQKAEESISIQRSFEAFFLKAYVLADSGVDPSYSATVISLLEDALKCPSDRLRKGQALNNLGGVYVDCGKLDSAADCYTSALKIRHTRAHQGLARVHFLRNNREAAYEEMTKLIEKAKNNASAYEKRSEYCEREQTMTDLQTVTQLDPLRVYPYRYRAAVLMDSHKENDAIAELSRAISFKADLHLLHLRAAFHEHIGDVPSALRDCRAALSLDPNHQEMLELQKRVNSQEP

SEQ ID NO: 9943 - DNA, 1973 bp, Zea mays
  misc_feature: Ceres CLONE ID no. 1573266
  misc_feature: Ceres CDNA ID no. 40041480
  CDS (101)..(1699): REFERENCED BY SEQ ID NO: 9944
aagtcgctccactctttcgcattttcgctctccatctatgctaccccccctcgccctcgtgccgtgaccagcgaagcttgcggtcttgcggggtacggagatggcgacggcccgggggatgaccccggctgcggcggacgctgtggaggagctcacgcggctgtaccgggagctgcctccgcgcccggccgtggaggaggtggaggcggcggcggcggtgctggcctcggcggacgcggaggaggaggcgcgcctcgccgagatcgccagggaggaggaggcggcgcgggtgcaggcacaggacgtgccggccgagctcttcgacgtgctgtgggaggccaggcgcaactccgtgcgcctccgctcgctgctgcagcggaaggaggccgcgcacgtcgtcgagctcgagaggcggttcaagctcttcgacgacctcatccagagggcgtcgcgggtggtttctccaggtgatggtgctaggggcggcggcgacgccgtcgtcgacctcgaggtcgaggcgaaccggaatcccgcgttggctgctgcggtggccgccgcggcaacagagatagaccgtggaagcaagggtggcttgggattggaaccgaagtccgtctcgtcgttgcatcgtgctacatcggcaggtactgacacagaaaagctgggccttatccaagtcgcaagccttatagagtcatcggcaaagaaagggactacagagctcaatctccggggtaagctggtggaccaagttgagtggctccctgtctcgcttgggaagttacaggatgtcacagagcttgatctatctgagaataggatcatggcactcccatctacaattggtagccttagatacttgacaaagcttgacctccactcaaaccagctgatcaatctgcctgatacctttggggaactttccagcctgattgatcttgacttgcgtgcaaaccagctaaagtctcttcctacatcatttggaaatctcattagccttgccaatcttgacctgagctcaaatctgttgaaggtccttcctgattgtttaggaaagttaaaaaacttgagaaggttaattgctgagacgaatgagattgaggagctaccctatactattggatcatgcacctcccttgtggagcttagattagattttaatcagctcaaagcccttccagaagccattgggaagttggaaaacctggaaatcctgacgttacactacaacagaattaaaggtctgcctacaacaattggtcatcttaccaggttgagggagctggatgtcagtttcaatgaagttgagactatacctgagaacatttgctttgcagccagccttgtgaagttgaatgtcagcaggaactttgccgacttaagagcccttccaaaatcaataggggaacttgagatgctagaggagctcgacatcagtagtaaccagataagagtacttccagactcttttggtcatctctcaaagctacgtgtgtttcatgctgatgaaactccactggaagtaccgcctaaagaagttgtaaaattaggggctcaggagctggttaattatatgaagaatatggctgctgcaagggaagtgagccggaaggaaacagatgagaggagcttttggacctggctccgctcactgtttggttgcgaacagaatcaaggatcgggaccagttccagtttagctgaaccatttcatctgcatgtgttgtcatgaaattgttcagtcttggtccatctctcaagtcagcgatgaaacgaggtatggttatcattattatttcccacttttttgtttgtgtatacaatgtatatatgtagcgctttcttgtaaaggttggtttatttctgtgtaattcatctgtatgaaacactgtcatgttactcaacgaaacacgagcggcccaacatttctattaaatacaggatgcattctagcacgaaaaaaaaaaaaaaaaa

SEQ ID NO: 9944 - protein, 526 aa, Zea mays
  misc_feature: Ceres CLONE ID no. 1573266
  misc_feature: Ceres CDNA ID no. 40041480
  misc_feature (433)..(455): Pfam Name: LRR_1 PFAM Desc: Leucine Rich Repeat
  misc_feature: Homolog of GI Number: 37537048 NR Desc: putative leucine
  misc_feature: Homolog of GI Number: 20148766 NR Desc: PSR9
  misc_feature: Homolog of GI Number: 50947559 NR Desc: putative PSR9
  misc_feature: Homolog of GI Number: 24216020 NR Desc: Leucine
  misc_feature: Homolog of GI Number: 45656721 NR Desc: putative lipoprotein
  misc_feature: Homolog of GI Number: 50910025 NR Desc: putative leucine
  misc_feature: Homolog of GI Number: 21700931 NR Desc: At1g12970/F13K23_18
  misc_feature: Homolog of GI Number: 17227620 NR Desc: leucine
  misc_feature: Homolog of GI Number: 24215150 NR Desc: putative outermembrane protein
  misc_feature: Homolog of GI Number: 28302239 NR Desc: Lrrc1 protein
MTPAAADAVEELTRLYRELPPRPAVEEVEAAAAVLASADAEEEARLAEIAREEEAARVQAQDVPAELFDVLWEARRNSVRLRSLLQRKEAAHVVELERRFKLFDDLIQRASRVVSPGDGARGGGDAVVDLEVEANRNPALAAAVAAAATEIDRGSKGGLGLEPKSVSSLHRATSAGTDTEKLGLIQVASLIESSAKKGTTELNLRGKLVDQVEWLPVSLGKLQDVTELDLSENRIMALPSTIGSLRYLTKLDLHSNQLINLPDTFGELSSLIDLDLRANQLKSLPTSFGNLISLANLDLSSNLLKVLPDCLGKLKNLRRLIAETNEIEELPYTIGSCTSLVELRLDFNQLKALPEAIGKLENLEILTLHYNRIKGLPTTIGHLTRLRELDVSFNEVETIPENICFAASLVKLNVSRNFADLRALPKSIGELEMLEELDISSNQIRVLPDSFGHLSKLRVFHADETPLEVPPKEVVKLGAQELVNYMKNMAAAREVSRKETDERSFWTWLRSLFGCEQNQGSGPVPV

SEQ ID NO: 9945 - DNA, 2271 bp, Zea mays
  misc_feature: Ceres CLONE ID no. 1573668
  misc_feature: Ceres CDNA ID no. 40041481
  CDS (203)..(2065): REFERENCED BY SEQ ID NO: 9946
agtgaagaaaacgccggctcgctcgctccgtctctctctctcctcgctgcatatctttcctttgccgcttgctgtctccctcgtctctctccagtcttcttcaccaccctgcttcctccctcttcctcttttgtttcatcagagagaaaaaaaactagatttagcgagggcggaccgacgacgcagtagaagcaaccgagacatggagcggcggaggaaggcaatgtggctgtaccccaaggtggtcggtttcaacccgccggagaggtggggccactccgcctgcttcttcgaaggcttcgtctacgtcttcgggggatgctgcggcggcctgcacttcggcgacgtgctgaagctgaacgtggagaccatggcgtggagtcttgtggccacgacggggcagtgcccgggcacgcgggacagccacggcgccgcgctggtgggccaccggatgctcgtcttcgggggcaccaacggcggcaggaaggtgaacgacctgcacgtgctggacctgcgcaccggggagtggacgcgcccgcagtgcaagggcgcgccgccgccgtcgccgcgggagagccacaccgtcaccgtcgtcgggggcgaccgcctcgtcgtcttcggcggcagcggggagggcgagggcaactacctctgcgacgtgcacgtgctggacgtgcccaccatgacgtggtcctcgcccgaggtcaggggcggccacgcgcccgcgcccagggacagccacagcgccgtggccgtcggccgcaggctcttcgtcttcggcggggactgcggcgaccggtaccacggcgacgtggacgtgctcgacgtcgacaccatggcgtggtcaatgtttccggtgaagggtgcatcgcccggcgtcagagcaggtcatgcagctatgagtgttggatctaaggtatatattatcggaggcgttggcgacaagcactactacagcgatgtctgggttcttgatgtcacaaaccgctcgtggagccaacttgaggtgtgcgggcagcgaccgcaggggcggttttctcataccgcagtggccatgaatactgacatcgcaatctacggaggatgtggcgaagatgagcgtcccctgaatgagcttctcattctgcagttgggctctgagcatccaaacggccgctacaacatttccatgtgcaaggttcttagcaaccactggagccaggagaagaggaagtttctcagatcagaagctagagatgcaagtgtgagcaatggggagatggctcagaaaccccgagaagcagaaacggagcaaaggaacccgttcctgcgtggcctagagaatggccgcgtgaagcgaaggagaaccggtgaagctcgcccgaaggaggccgagtcagagcaagaggagcactcgctgtccctttcccaacattcctcgccgtcgcagtcggatcaggagcagaccggagctcacaagcttccggcctcggccaacacgtcgccttcagccctgcagccgttcgctcgtctcaacggcaatggcgctcagctgagggccgccggacccggaggcgtctcctcgaggcctctcaaggcggaccagcttctccgcaccatcgcgccacagcatcggcgggaggtgcagttcctttcctccgaccatcagccgcagccccgggggcctcccggcccaccacaccttattggcgcagaggttcatgggacagtcgatggagcctttgattctgggtacctcgtgaccgccgtcgtgaacgggcagctcttcagaggcgttctgtttgctccgggacctggggtcacagctccgaggccggcggtgcatcaccagatcctgacgagctccgccgtgcctccccagcaacggccgctgctggcgcacgccatccccgtccacgcctggccagtgccgctgccgcaggccacgggcttcgtgctgccggactgtgcccaccacgcgcggcaagggttcccggcgaaggccgtcaagtccgagccggagcgaggcagcagcgacctgcacgatgttgtgctcacgctgggagggcctggagggggcaagtgagcccccccatggaaggcctcaagaactgtcgaggtcctggcctgctgctgttggcctcttggattgctttgtaaattagtctggttgaggaaaaaaataagactagcagcttttctataatctttcccgggtgattttagggttctaatatgtgactttacatatataaatatagtgttagcttgatgcaaaaaaaaaaaaaaaaa

SEQ ID NO: 9946 - protein, 620 aa, Zea mays
  misc_feature: Ceres CLONE ID no. 1573668
  misc_feature: Ceres CDNA ID no. 40041481
  misc_feature (122)..(170): Pfam Name: Kelch_2 PFAM Desc: Kelch motif
  misc_feature: Homolog of GI Number: 34905476 NR Desc: P0682B08.13
  misc_feature: Homolog of GI Number: 15221823 NR Desc: kelch repeat
  misc_feature: Homolog of GI Number: 59857803 NR Desc: Rab9 effector p40
  misc_feature: Homolog of GI Number: 48145791 NR Desc: RAB9P40
  misc_feature: Homolog of GI Number: 12653463 NR Desc: Rab9 effector p40
  misc_feature: Homolog of GI Number: 33695109 NR Desc: Rab9 effector p40
  misc_feature: Homolog of GI Number: 2217970 NR Desc: p40
  misc_feature: Homolog of GI Number: 42572263 NR Desc: acyl
  misc_feature: Homolog of GI Number: 50919943 NR Desc: putative transcription factor
  misc_feature: Homolog of GI Number: 60475083 NR Desc: RING Zn finger
MERRRKAMWLYPKVVGFNPPERWGHSACFFEGFVYVFGGCCGGLHFGDVLKLNVETMAWSLVATTGQCPGTRDSHGAALVGHRMLVFGGTNGGRKVNDLHVLDLRTGEWTRPQCKGAPPPSPRESHTVTVVGGDRLVVFGGSGEGEGNYLCDVHVLDVPTMTWSSPEVRGGHAPAPRDSHSAVAVGRRLFVFGGDCGDRYHGDVDVLDVDTMAWSMFPVKGASPGVRAGHAAMSVGSKVYIIGGVGDKHYYSDVWVLDVTNRSWSQLEVCGQRPQGRFSHTAVAMNTDIAIYGGCGEDERPLNELLILQLGSEHPNGRYNISMCKVLSNHWSQEKRKFLRSEARDASVSNGEMAQKPREAETEQRNPFLRGLENGRVKRRRTGEARPKEAESEQEEHSLSLSQHSSPSQSDQEQTGAHKLPASANTSPSALQPFARLNGNGAQLRAAGPGGVSSRPLKADQLLRTIAPQHRREVQFLSSDHQPQPRGPPGPPHLIGAEVHGTVDGAFDSGYLVTAVVNGQLFRGVLFAPGPGVTAPRPAVHHQILTSSAVPPQQRPLLAHAIPVHAWPVPLPQATGFVLPDCAHHARQGFPAKAVKSEPERGSSDLHDVVLTLGGPGGGK

SEQ ID NO: 9947 - DNA, 2272 bp, Zea mays
  misc_feature: Ceres CLONE ID no. 1573776
  misc_feature: Ceres CDNA ID no. 25892095
  CDS (63)..(1913): REFERENCED BY SEQ ID NO: 9948
aaaaaaaaaaaaaaaacaaatccaccggcatctccaagccctagccccaaccccgaccgcccatgtccgccatcgcggcctcctcggccgccgccgcgtcgaactccgatgaggaagaaaactatgaggagtacatcccagtcgccaagcgccgggccatggaggccgagcgcctccgccagctccgcctctccaagtcggcgccggcctctgccgtctcatccctcccgatgccacctcccccgcctcttttgccagcgcagacctccgttcccgacgccgccgctaagcccagccttctcgtcaaggccacgcagcttaagcgcgcggccccggaggtgaccgccacggagcagcgcatccagcaggagaaggaagtgattgaaaatctctcagacaacaaatcgctcaggtcagtccgcgagatcgccaagggcatcatctacacggaaccgatccagaccgggtggaagccgcccctccgcctccgccgcatgccgctcgccaaagccaacgagttccggcgcaagtggcacatcatcgtcgacggtgacgatataccgccgcctgcgcgtgatttccgggatctccgcctcccggagcccatgctccggaagctgcgcgagaggggtatcgtccagcccacgccgattcaggtgcaggggctgcccgttgtgctctctgggcgtgacatgataggcatcgctttcacggggtcggggaagactctggtgttcgtgctgccgcttatcatggtggcgctgcaggaggaatcattgatgccgatcgtgcctggcgagggcccgtttgggatgatcatatgcccgtcgcgggaactggccaagcagacatatgatgtgattgagcagtttctcattccacttaaggaggctggttatccggagataaggcatttgctttgcattgggggtgtggatatgaggacacagctcgatgtgttgaagaagggcgtgcacattgtggtggcaacgcctggtcggctcaaggatttgcttgccaagaagaagatgaaccttgacaactgcaggtacttaaccttagatgaagcggataggctggttgacctaggatttgaagatgacatcaaggaggttttcgaccatttcaaggatcaaaggcaaactcttctcttttctgctactatgcctcagaagattcaaaattttgcgaagaacgcccttgtgaaaccagttactgtcaatgtgggaagagctggagctgcaaatctagacgtcattcaagaagtcgagtatgtaaaggaagatgctagaattatatacctccttgaatgcctccaaaagactccacctcctgttctcattttctgtgaaaacaaggctgatgtcgactacatccatgagtaccttcttctaaagggagtggaggctgttgctatccatggaggaaaagatcaagaggagagacagaacgcaattgactccttcaagactggtaggaaggatgttctagtggctactgatgttgcatcgaagggtcttgattttcctgacattcagcatgtcattaactatgacatgcccgccgaaatagagaactatgtccaccgaatcggtcgaactggtcgatgtgggaagactggcatagcaactaccttcatcaacaagaaccaaactgagaccacgcttctcgatctcaagcatctgctgaaggaggcaaagcagaggattccaccggtgttggcggagctcaacgatccattggatgatgaggaaataattgccaaggagagtggtgtcaaaggttgtgcgtattgtggtgggcttggccatcgtgtcagtgactgtccgaagttggagcaccaaaagtccatggcaattgctggctcgagaaaagactactttggcggcgggggttaccgaggagaaatatgattgctctaggttgatgcttgcgtgtggttatcaggagctaagatgctgcaatttcaggtcatacatgtcacatgtatcagctagccaaggctcctcccccatcgttgaagggagacggtttgcgttaacgaacttgtgatatgctgctgggtatgaactgcttgctactgacctaccatgtatcttgtttgaaggacgcaagttgattatcctgccctgttgtaaaatgtaaccagaacaattgctggcgtatttcttaagcaccagttttagcccctttctgtaagcagtcgacatttcagttcaactcatgtatgtatattttgatcttgtatacagtactaaaaaaaaaaaaaaaa

SEQ ID NO: 9948 - protein, 616 aa, Zea mays
  misc_feature: Ceres CLONE ID no. 1573776
  misc_feature: Ceres CDNA ID no. 25892095
  misc_feature (194)..(375): Pfam Name: DEAD PFAM Desc: DEAD/DEAH box helicase
  misc_feature (441)..(517): Pfam Name: Helicase_C PFAM Desc: Helicase conserved C
  misc_feature (573)..(590): Pfam Name: zf PFAM Desc: Zinc knuckle
  misc_feature: Homolog of GI Number: 8843865 NR Desc: DEAD
  misc_feature: Homolog of GI Number: 6118555 NR Desc: DEAD
  misc_feature: Homolog of GI Number: 30584005 NR Desc: Homo sapiens DEAD
  misc_feature: Homolog of GI Number: 62651110 NR Desc:  similar to DEAD
  misc_feature: Homolog of GI Number: 57085163 NR Desc:  similar to DEAD
  misc_feature: Homolog of GI Number: 62663208 NR Desc:  similar to DEAD
  misc_feature: Homolog of GI Number: 66525350 NR Desc:  similar to ENSANGP00000017814
  misc_feature: Homolog of GI Number: 23613298 NR Desc: RNA helicase
  misc_feature: Homolog of GI Number: 23485792 NR Desc: RNA helicase
  misc_feature: Homolog of GI Number: 56501072 NR Desc: RNA helicase
MSAIAASSAAAASNSDEEENYEEYIPVAKRRAMEAERLRQLRLSKSAPASAVSSLPMPPPPPLLPAQTSVPDAAAKPSLLVKATQLKRAAPEVTATEQRIQQEKEVIENLSDNKSLRSVREIAKGIIYTEPIQTGWKPPLRLRRMPLAKANEFRRKWHIIVDGDDIPPPARDFRDLRLPEPMLRKLRERGIVQPTPIQVQGLPVVLSGRDMIGIAFTGSGKTLVFVLPLIMVALQEESLMPIVPGEGPFGMIICPSRELAKQTYDVIEQFLIPLKEAGYPEIRHLLCIGGVDMRTQLDVLKKGVHIVVATPGRLKDLLAKKKMNLDNCRYLTLDEADRLVDLGFEDDIKEVFDHFKDQRQTLLFSATMPQKIQNFAKNALVKPVTVNVGRAGAANLDVIQEVEYVKEDARIIYLLECLQKTPPPVLIFCENKADVDYIHEYLLLKGVEAVAIHGGKDQEERQNAIDSFKTGRKDVLVATDVASKGLDFPDIQHVINYDMPAEIENYVHRIGRTGRCGKTGIATTFINKNQTETTLLDLKHLLKEAKQRIPPVLAELNDPLDDEEIIAKESGVKGCAYCGGLGHRVSDCPKLEHQKSMAIAGSRKDYFGGGGYRGEI

SEQ ID NO: 9949 - DNA, 1994 bp, Zea mays
  misc_feature: Ceres CLONE ID no. 1573856
  misc_feature: Ceres CDNA ID no. 40041482
  CDS (204)..(1571): REFERENCED BY SEQ ID NO: 9950
aagagcagatatcatccgttcgtttgtttgcccttttttgccggcctcctcgtctcttccggttccggctacaagtgaagtgagctcggccgtctgttgcctagcgtgctgcttcgttcgtcgttggcttgcagcagcttgccgaagagaagaaagcagcaggccgggagctttctgtttgtttggatccgagtgagaagaagatggtggccgagtgccacggaggaggagcagcagcagcaggaggggacttcctcatcaagctcttcgggatgaccatccccgtgccggagtgcggcgacgccaaggatattcagcagagcaagagcaacaggtggaccgagcaggatcaggattcccatggcctggagaccgcgcccgcgcccgcgcacacggacacggacacggacacctccgacccgtccccgcagccggaggtcgtggacgccgaggaccccacggagacgcaacagaggcccggcaacggcgacggcgagggcgatgctgccggccagagggagaagctgaagaagcccgacaaggtgctgccgtgcccgcgctgcaacagcatggacaccaagttctgctacttcaacaactacaacgtcaaccagccgcgccacttctgcaagaactgccagcggtactggacggccggcggcgccatgcgcaacgtgcccgtgggggccggccgccgcaagaacaagaacgccgccgcctcgcacttcttccagagggtccgggcgaccaacgccacggtgctcagcttcgggggccatggtggcgcgcctcctgctgcccgcttggacctggacctcgccgagcagctgagccaccagctggccccggtcaggagcgccggcgacgcgggccgcccttgcagcgaaggatcgagcagcagggacggcaacggcagcaggtcttctgtagacgaagctgcagcaaacgcagacgacgggtcagtgcagcagcacccaggcccagcaagcatgaacagcagcggggcaaccgtgtggccgccgtacagctgcgccccagctccggcggcgtacttcccccagggcatcgcgattccgatctacccggccgcaccggcctactggggctgcatggttcccggagcttggagcctgccatggccggtgcagcacccgtcgtcgtcgtcgtcgccgtcgcccaccaccaccagtgctccttcagtcgtctcgtcatccggggcagctgacgactcatcatcccacgcgctgggcaagcgcccccgggaccgggagggtgacgacgggagaaacggcggcaacgccaaggtgtgggcgcccaagagcatccggatagacgacgtggacgaggtggccaggagctcaatctggtccctcgtcgggatcaaaggcgaccagacgaagcagcaggacgcagcagacgaccacgccggtgggcacagcaagcagctcgggacggtgttcgagcccaagcgcggcgaggccaccaagaaggctatgatgacaagctcgccgctccttcacgcgaaccccgttgcgctcacgcgctccgtggccttccaggaggggtcttgattcttcttcaaggacatccatcagcagcagcaggaatttcctcatgcaacgttccttctcatctgaacttctgaactgaacatgagctgatcagcctgacagtacgtactgaattttgtttttgtataaatcatcataggattgtaatatctatctatatgcttagtgggaaacttagctagcgtatgtgtaagtggacttgtaatataggcggcacgcaggatgtacatagaattaattagctatatgggtttgagaaagaccaggagatcaataagaggtccctgggtgtagataaataacattaggggaaggaatgtattgcttcaggtatttcactcttcagcaacttgttgtcaaagtccattctataacaaagtattctattttttgttcaaaaaaaaaaaaaaaaaaaaaaaaaaa

SEQ ID NO: 9950 - protein, 455 aa, Zea mays
  misc_feature: Ceres CLONE ID no. 1573856
  misc_feature: Ceres CDNA ID no. 40041482
  misc_feature (110)..(172): Pfam Name: zf PFAM Desc: Dof domain
  misc_feature: Homolog of GI Number: 50919879 NR Desc: putative zinc finger DNA
  misc_feature: Homolog of GI Number: 78708599 NR Desc: Dof domain
  misc_feature: Homolog of GI Number: 37534202 NR Desc: putative H
  misc_feature: Homolog of GI Number: 21538791 NR Desc: dof zinc finger protein
  misc_feature: Homolog of GI Number: 21536859 NR Desc: H
  misc_feature: Homolog of GI Number: 53749192 NR Desc: At5g39660
  misc_feature: Homolog of GI Number: 15983797 NR Desc: AT5g39660/MIJ24_130
  misc_feature: Homolog of GI Number: 22136158 NR Desc: H
  misc_feature: Homolog of GI Number: 1669341 NR Desc: AOBP
  misc_feature: Homolog of GI Number: 50940107 NR Desc: putative ascorbate oxidase promoter
  misc_feature: Useful for delaying flowering time
  misc_feature: Useful for making plants with altered leaf shape eg curled leaves
  misc_feature: Useful for making plants with increased biomass and foliage
MVAECHGGGAAAAGGDFLIKLFGMTIPVPECGDAKDIQQSKSNRWTEQDQDSHGLETAPAPAHTDTDTDTSDPSPQPEVVDAEDPTETQQRPGNGDGEGDAAGQREKLKKPDKVLPCPRCNSMDTKFCYFNNYNVNQPRHFCKNCQRYWTAGGAMRNVPVGAGRRKNKNAAASHFFQRVRATNATVLSFGGHGGAPPAARLDLDLAEQLSHQLAPVRSAGDAGRPCSEGSSSRDGNGSRSSVDEAAANADDGSVQQHPGPASMNSSGATVWPPYSCAPAPAAYFPQGIAIPIYPAAPAYWGCMVPGAWSLPWPVQHPSSSSSPSPTTTSAPSVVSSSGAADDSSSHALGKRPRDREGDDGRNGGNAKVWAPKSIRIDDVDEVARSSIWSLVGIKGDQTKQQDAADDHAGGHSKQLGTVFEPKRGEATKKAMMTSSPLLHANPVALTRSVAFQEGS

SEQ ID NO: 9951 - DNA, 2167 bp, Zea mays
  misc_feature: Ceres CLONE ID no. 1574106
  misc_feature: Ceres CDNA ID no. 36691311
  CDS (410)..(1795): REFERENCED BY SEQ ID NO: 9952
aatcttctcttcttcttcccccagtcctccccccctttcccctcttcggcctctctcgctcagctcactcttcattaagcgagctcacgtcgttcctcccttcttcttcttcttatccgttgttcaattcgttcagctagccggccagagatcgagcatcatctccatcatcgattcatccatctcatctttctcttcttctattctatgtcgtcgtcgtcccagattagatcgaagctgctagcagtctatccagtctctagctagctagctagatcaagcccgcagactatacaatataatacaagctagctacgtgcttattattgctttattagtctagaataatcttgatatatacgatcgaacatatatctcgatctccaccgatacacacccggccctatccatgcttgaggtgtcgacgctgcgcggccctactagcagcggcagcaaggcggagcagcacggcggcggcggcggcggcttcgtcggcgaccaccatgtggtgttcccgacgtccggcgactgcttcgccatggtggacgacaacctcctggactacatcgacttcagctgcgacgtgcccttcttcgacgctgacggggacatcctccccgacctggaggtagacaccacggagctcctcgccgagttctcgtccacccctcctgcggacgacctgctggcagtggcagtattcggcgccgacgaccagccggcggcggcagtagcacaagagaagccgtcgtcgtcgttggagcaaacatgtggtgacgacaaaggtgtagcagtagccgccgccagaagaaagctgcagacgacgacgacgacgacgacgacggaggaggaggattcttctcctgccgggtccggggccaacaagtcgtcggcgtcggcagagggccacagcagcaagaagaagtcggcgggcaagaactccaacggcggcaagcgcaaggtgaaggtggactggacgccggagctgcaccggcggttcgtgcaggcggtggagcagctgggcatcgacaaggccgtgccgtccaggatcctggagatcatgggcacggactgcctcacaaggcacaacattgccagccacctccagaagtaccggtcgcacagaaagcacctgatggcgcgggaggcggaggccgccacctgggcgcagaagcgccacatgtacgcgccgccagctccaaggacgacgacgacgacggacgccgccaggccgccgtgggtggtgccgacgaccatcgggttcccgccgccgcgcttctgccgcccgctgcacgtgtggggccacccgccgccgcacgccgccgcggctgaagcagcagcggcgactcccatgctgcccgtgtggccgcgtcacctggcgccgccccggcacctggcgccgtgggcgcacccgacgccggtggacccggcgttctggcaccagcagtacagcgctgccaggaaatggggcccacaggcagccgccgtgacgcaagggacgccatgcgtgccgctgccgaggtttccggtgcctcaccccatctacagcagaccggcgatggtacctccgccgccaagcaccaccaagctagctcaactgcatctggagctccaagcgcacccgtccaaggagagcatcgacgcagccatcggagatgttttagtgaagccatggctgccgcttccactggggctcaagccgccgtcgctcgacagcgtcatgtcggagctgcacaagcaaggcgtaccaaaaatcccaccggcggctgccaccaccaccggcgccaccggatgacatactatctcgtcgacaatacatgcatgtacaatagacggatgtctagtagtatagtagattgctgctagctagctagccgctagagtgtagtagcatatgcatgccttttttttcttcttctttttttgcccttattattaagctggctaatagcgattgagatggagcttgacacagatctgctagctagctatttgagggtttctcttgtatgctacctattgctgctgcttgctgctgagacaagtaatgtacgtacgcctgtgcaaacgacacatcggattgtattgtattactagttatatgaacaacaacaataataataggcacatgcatgcctgcctagtatgcgaaaaaaaaaaaaaaaaa

SEQ ID NO: 9952 - protein, 461 aa, Zea mays
  misc_feature: Ceres CLONE ID no. 1574106
  misc_feature: Ceres CDNA ID no. 36691311
  misc_feature (186)..(236): Pfam Name: Myb_DNA PFAM Desc: Myb
  misc_feature: Homolog of GI Number: 11177540 NR Desc: putative transcription factor Golden2
  misc_feature: Homolog of GI Number: 13940498 NR Desc: putative transcription factor OsGLK1
  misc_feature: Homolog of GI Number: 54291302 NR Desc: putative golden2
  misc_feature: Homolog of GI Number: 62632221 NR Desc: golden2
  misc_feature: Homolog of GI Number: 13940496 NR Desc: putative transcription factor ZmGLK1
  misc_feature: Homolog of GI Number: 54291303 NR Desc: putative golden2
  misc_feature: Homolog of GI Number: 56784113 NR Desc: putative transcription factor OsGLK2
  misc_feature: Homolog of GI Number: 34904478 NR Desc: OSJNBa0086P08.18
  misc_feature: Homolog of GI Number: 13940500 NR Desc: putative transcription factor OsGLK2
  misc_feature: Homolog of GI Number: 55669165 NR Desc: golden 2
MLEVSTLRGPTSSGSKAEQHGGGGGGFVGDHHVVFPTSGDCFAMVDDNLLDYIDFSCDVPFFDADGDILPDLEVDTTELLAEFSSTPPADDLLAVAVFGADDQPAAAVAQEKPSSSLEQTCGDDKGVAVAAARRKLQTTTTTTTTEEEDSSPAGSGANKSSASAEGHSSKKKSAGKNSNGGKRKVKVDWTPELHRRFVQAVEQLGIDKAVPSRILEIMGTDCLTRHNIASHLQKYRSHRKHLMAREAEAATWAQKRHMYAPPAPRTTTTTDAARPPWVVPTTIGFPPPRFCRPLHVWGHPPPHAAAAEAAAATPMLPVWPRHLAPPRHLAPWAHPTPVDPAFWHQQYSAARKWGPQAAAVTQGTPCVPLPRFPVPHPIYSRPAMVPPPPSTTKLAQLHLELQAHPSKESIDAAIGDVLVKPWLPLPLGLKPPSLDSVMSELHKQGVPKIPPAAATTTGATG

SEQ ID NO: 9953 - DNA, 1995 bp, Zea mays
  misc_feature: Ceres CLONE ID no. 1574270
  misc_feature: Ceres CDNA ID no. 35391528
  CDS (123)..(1673): REFERENCED BY SEQ ID NO: 9954
aacgatgcgagtggcagcgcgcgagcgcccattcccgttcctcctcgcccatcggcttctcgcggtctcgccccggcacctcgcactcccaccgcagtccaaaatcctcggcctcacaccctatgcctccgcctgttcttcgcctgttcgcggcagctccgccccgcgctctcggtggccgcgccagggcgcatcgtggcgatggcgggttcgcgcgcctgcgcctgcgcgtcagagcagcggctggggaggccgcgccggcgccttccagaacccagatgataatggataagatctctgctggcgaaggagtcggaggcgctggaggggcttactcatatagtgcgttgaaaagattggatcaaatatggtctagtatttgtgaagctcaagcagattccaaagtccctgaagttgttactcgggttgaagggctgttggctgattctgatcttggttctggttcagagatatttgatgtaattgtatgtggcggcacattaggtatatttgtagctactgctctcagttctaaaggccttcggattggaattatcgaaagaaacataatcaaagggagggaacaggagtggaatatttcaagaaaggagcttatggaaattgtagagattggtattctttcagaagcagaacttgaacaaataatttcaagtgatttcaatcctaatagatgtggatttgaagataaaggtgaaatttgggtggagaacattcttaatcttggtgtttcgcctgctaaacttgttgagaacatgaaagaacgcttcatttcttcgggaggagcaatatttgaggagaaaagtctatcaagcatttatgtctatgatgatctcgctgcttttcctgctggttctggtcccaatgaccgtactacatacatgttcacttatgttgatccaacatttggaggcccaaagctagaagaacttttggaagtgttttgggatcttatgcctgcttaccaggatgtgcttcttcaaaatttggatataagaagagttatatttggaattttcccaacttatcgggatagccccttgccagctgcatttgaccgtatcttacaggttggcgatgctagtggaatacagtcacctgtttcttttggaggttttggaagcttgacgagacatcttggccgtttgtctagtggtatatgtgaagcagttgaaggtgatttcctggatgctcatagtttgcagctgctcaacccttacatgccaaacttaagtgcatcatggttgttccaacgagcgatgtcagtaaggccacatgtcaatgtttcaccaacctttatcaatgagcttctctttgctaattttcagtcaatgcagaaactaggggattcggtacttcggccatttctacaggatgtaatacagtttggacctcttgtgaaaactttggggctagtaatgatcactagaccacaaattttaccttccatatttaagcaggttggactgggagtcatccttgagtggtcaggccattttatgatgcttggttactacacattcctttctacctatattgatccgatcctgaggtcttgggtggaatccttgcccccacgggacaaatatcagtggaaacggtacctggaagcttggagatatggagccggtttagattaccgccaaggggaataaactgtttcactaaaaacacatgaaagtttcctcagaaacaaaattatgtatagatacatgaatatagcactgtcaggggaaagatgaatagagtacatatatgatctctgattgatttagttttccttttccagagcacaagattgaacatcaagtttagaatgtgtattatctagtttcacttgtaatttgcccactttactgaactgatggagtgaatatgtatagtactctagaatttcaaataatgctgaatggagctgagatgctcaatatttgttgatcaacgtatcaattatgtgaaataaaaaaaaaaaaaaaa

SEQ ID NO: 9954 - protein, 516 aa, Zea mays
  misc_feature: Ceres CLONE ID no. 1574270
  misc_feature: Ceres CDNA ID no. 35391528
  misc_feature: Homolog of GI Number: 50945853 NR Desc: Glycine/D
  misc_feature: Homolog of GI Number: 46135210 NR Desc: COG0675: Transposase and inactivated derivatives
  misc_feature: Homolog of GI Number: 71675453 NR Desc: similar to Dehydrogenases
  misc_feature: Homolog of GI Number: 67925005 NR Desc: similar to Dehydrogenases
  misc_feature: Homolog of GI Number: 53765570 NR Desc: COG0644: Dehydrogenases
  misc_feature: Homolog of GI Number: 71674643 NR Desc: similar to Dehydrogenases
MPPPVLRLFAAAPPRALGGRARAHRGDGGFARLRLRVRAAAGEAAPAPSRTQMIMDKISAGEGVGGAGGAYSYSALKRLDQIWSSICEAQADSKVPEVVTRVEGLLADSDLGSGSEIFDVIVCGGTLGIFVATALSSKGLRIGIIERNIIKGREQEWNISRKELMEIVEIGILSEAELEQIISSDFNPNRCGFEDKGEIWVENILNLGVSPAKLVENMKERFISSGGAIFEEKSLSSIYVYDDLAAFPAGSGPNDRTTYMFTYVDPTFGGPKLEELLEVFWDLMPAYQDVLLQNLDIRRVIFGIFPTYRDSPLPAAFDRILQVGDASGIQSPVSFGGFGSLTRHLGRLSSGICEAVEGDFLDAHSLQLLNPYMPNLSASWLFQRAMSVRPHVNVSPTFINELLFANFQSMQKLGDSVLRPFLQDVIQFGPLVKTLGLVMITRPQILPSIFKQVGLGVILEWSGHFMMLGYYTFLSTYIDPILRSWVESLPPRDKYQWKRYLEAWRYGAGLDYRQGE

SEQ ID NO: 9955 - DNA, 2214 bp, Zea mays
  misc_feature: Ceres CLONE ID no. 1574281
  misc_feature: Ceres CDNA ID no. 40041483
  CDS (436)..(1998): REFERENCED BY SEQ ID NO: 9956
aaaaaaaacgatacgcaccagagcctcttgctcctcgtcctctctcctctttctcccctttcgcctctctcttcttctaccaccactcttctgctcgctaaaaaaagcttctcgagcttataaatacgttccccttccccccggcgccaagttcctccccccgatccgcttcccccttccacccgccgatcgccctccgctcgctccaccgcggcgggcgatcgctcatctccccctaacctcccccgctcgcgattcccgaggcgaggtgccacccaccgcagatttcttccgacggacggttggctcgctcacccccctacttcgctgatcggatcgcgtgctgcccgaggtagaggtgatgataaggcatagttgtttgacttagcctgccttagctatttcttgaagctaagggaaataataattggtgttatggcatttagaaatatggtttgcactccccaagtcattaatcttacatcagactcagagagagggcaagctcaaggaggcaatggtagtgagatatctgagcaaggtgcacaacatgctgccagagttgtaggaaatgcaatgaacattggtctctctggtgtgcgaagttactatgatatgagcataaatcatcaccatcagtctgttcataacccacccccgaatttaggtgttgattctggttttgtcttcgcatcaaatatgtacaatccctgcatgtcatcaacatcaatgaacagacatgtttctcatgctcagagctttggatcagggaatcaagtgttgcctcaaaaccaagtcccaggaactatggatgagagtagcagaaatgacagtattggtgaaagtgctagagagcatattaaaaggaaaaatgctgcagttgctggaagttatcattttgttaatggatttgcaagctcaagctcatcttctcatgcacctcaaaatcctatgcttgggccttgggatccttcttttgaatcaactgtttcttctaatgttgcaccattcaacccatcagaatatcatggacacaacaacagttggccgtccttagaaggatcttccataacaggaagtaatggattcaactcaatggttgttcatccagactcagtacagcgtgggaactatacatttccacccactcacattagccattcatggatgtcccatgctacaaatggtattgctgatggagttccccagtgggaatatgccaatgcaactgctaatattcaaggcagatttgcccattcaggagccacagaaatcgcaaatgttggttttcatgaatatcagaatggcccttcaactatttgtcggggaccagtaccttatttccaccagcatgcgatgcatggcatgcaagctcttgatcctactcaaatgcaagttccttatcaacaatgccacagtaatggtttcttgcatggtggtattaattaccctggaaaccgtctccaattaggtccacgaaatccagttctcttcaccagttctgaacgtgcttttgggcctccacagcatccgttcctggcaaatccagttaaccaccgcaacataaggattctaccacccgagcatgctacaataatggatttttcgagattgtatgaagtgtcaaatactgtagatgagcatagagatatgcgtctagatatagacagcatgacgtatgaggagcttttagcattagaagagcagattggagatgtcaatactggtctgacaaaaagtcacattgtagataaattgaggactagcctatatgttccaggaatatcgagcatgtctgatcagccatctaaattttctctagagaatgatgcttgcataatatgccaggaggagtaccaggttagggactgcgttggcacccttgactgcggtcacaggtaccacgctgagtgcgtgaagcagtggctgatggtgaagaacttgtgccccatctgcaagacgacagcattgtctgccaacagaagacaaggacagtgagcgggaatggagaagcctgttggttatttgctttgacaaacgttcagctcaattttgtatataaagaagtggtagacaatggcgctacctgtatttgttgttcactttgttgtgactgggagtactcatcagcttcctgaaactgtacagccataacatttgttatttttcttcaaatgtagaatgttttaaatcgctgaaaaaaaaaaaaaaaaa

SEQ ID NO: 9956 - protein, 520 aa, Zea mays
  misc_feature: Ceres CLONE ID no. 1574281
  misc_feature: Ceres CDNA ID no. 40041483
  misc_feature (467)..(507): Pfam Name: zf PFAM Desc: Zinc finger
  misc_feature: Homolog of GI Number: 56202174 NR Desc: C
  misc_feature: Homolog of GI Number: 56202173 NR Desc: RING
  misc_feature: Homolog of GI Number: 34910942 NR Desc: putative U2 snRNP auxiliary factor
  misc_feature: Homolog of GI Number: 23506055 NR Desc: At3g15070/K15M2_22
  misc_feature: Homolog of GI Number: 8777490 NR Desc: RING
  misc_feature: Homolog of GI Number: 79319806 NR Desc: protein binding / ubiquitin
  misc_feature: Homolog of GI Number: 3822225 NR Desc: RING
  misc_feature: Homolog of GI Number: 558543 NR Desc: C
  misc_feature: Homolog of GI Number: 7767667 NR Desc: F27F5.26
  misc_feature: Homolog of GI Number: 25141205 NR Desc: At4g31450/F3L17_20
MAFRNMVCTPQVINLTSDSERGQAQGGNGSEISEQGAQHAARVVGNAMNIGLSGVRSYYDMSINHHHQSVHNPPPNLGVDSGFVFASNMYNPCMSSTSMNRHVSHAQSFGSGNQVLPQNQVPGTMDESSRNDSIGESAREHIKRKNAAVAGSYHFVNGFASSSSSSHAPQNPMLGPWDPSFESTVSSNVAPFNPSEYHGHNNSWPSLEGSSITGSNGFNSMVVHPDSVQRGNYTFPPTHISHSWMSHATNGIADGVPQWEYANATANIQGRFAHSGATEIANVGFHEYQNGPSTICRGPVPYFHQHAMHGMQALDPTQMQVPYQQCHSNGFLHGGINYPGNRLQLGPRNPVLFTSSERAFGPPQHPFLANPVNHRNIRILPPEHATIMDFSRLYEVSNTVDEHRDMRLDIDSMTYEELLALEEQIGDVNTGLTKSHIVDKLRTSLYVPGISSMSDQPSKFSLENDACIICQEEYQVRDCVGTLDCGHRYHAECVKQWLMVKNLCPICKTTALSANRRQGQ

SEQ ID NO: 9957 - DNA, 1888 bp, Zea mays
  misc_feature: Ceres CLONE ID no. 1574397
  misc_feature: Ceres CDNA ID no. 36706189
  CDS (83)..(1429): REFERENCED BY SEQ ID NO: 9958
ggatgcgatcataccagcactaaagcaccggatcccatcagaactccgaagttaagcgtgcttgggcgagagtagtactaggatgggtgacctcctgggaagtcgacccacccatccaaccacttccacgaatggccctcgctctgtgaactcgtcgggttccatggcggcgccgtcgcctaaacccccgacaccacgcgggcgctgccaccacccgcccaacgccacccgccgcctccacgtggccacccgctgcttccccgacccaccaccaccacctgcctccatgccgccgatcccgagtccgaaccctgtgctgtcccttctctccgcggtgcccgactgggccgacgccatccaggagcgccgcgtccgcgaccgccgcccgctctacgaccacgccacctggcggcaccaccgcagctcccgccgccacctgcgccacctcctcacctcgctgtcctcccgcgccatcctctccctggcgcccccggtgtccgccttcaccgccttcgccgccgccatcgccacctacaacacgctcctaccggcctacgcgctcaccgcatcctcgctcccctacgagctcactgcgcccgcgctcgcgctcctcctcgtcttccgcaccgaggcttcctacgcgcgcttcgacgagggacgcaaggcgtggatgcgcgtgctcgccagcgcagccgacctcgccgggatgctcatgcgtcatcctcctcctaacaatctgcatacgggtggcgctcccaatccgggaccgggaggacgacaggctgacgacgagccgctcaggcgcgcgctcgtcaactacgtcctcgccttccccgtcgcgctcaagtgccacataatttgcgactctgacgtaaaaggggaccttgagggcttgcttggcgaagatgacctgagcgttgttctagcatcgaaacatcggccacgctgtattatcgagttcatcgcacagagtctccaaatgctagatctcgacgagcagaagaggagcatcatggtgtctaaactgtcttgttttcttgaaggaatcggcgtttgcgagcagctcatggggatccctatccctctcgcatacactagacttacttcaaggttccttgttctgtggcatcttacactcccaatcatactctgggaagaatgtaaatggattgttgttccagctacctttatcagtgctgcatcgctattctgcatcgaggaagtgggtgttctaatcgaagagccgttccccatgctagctcttgatgccctgtgcaagcagctccacgacggtattaaggatgtgatggagatgcagaactcggttcactcgcgactagttgccaagactgctacggaccacaggggcagtaggcgcgagaacaatggttggcctagctccaaaagagaaggagccaagattgattgagcacgcaaggtcggtcgggtcgttgtgaatttatttgaagatagcattgcaagcaatctgtggcaaccagatatccatgaacgaactggagaacttgtggaccccatttcctcctgcaatggtatgtacctgtcctatgtaaaatgcactcgctactgcttggatagctactaaagccgggagcgagcctgggattgggattgggattggtgtagggaggagttgcatcagcacgttggtgtacatgtggcgatgagtagagcagatttattatgtgttgtaaataataaaagaagaaagagacacaaagctagcttatgttgttgtacgtagctgtgtgtgtctatagatagagataaattagatagtagatcgtagtcgattgaaacatacgtaatggtgtgatattttgtcccccctgcaactgcaagattgcttgcccaaaaaaaaaaaaaaaaa

SEQ ID NO: 9958 - protein, 380 aa, Zea mays
  misc_feature: Ceres CLONE ID no. 1574397
  misc_feature: Ceres CDNA ID no. 36706189
  misc_feature (172)..(356): Pfam Name: UPF0187 PFAM Desc: Uncharacterised protein family
  misc_feature: Homolog of GI Number: 47572028 NR Desc: COG3781: Predicted membrane protein
  misc_feature: Homolog of GI Number: 23125456 NR Desc: COG3781: Predicted membrane protein
  misc_feature: Homolog of GI Number: 46135015 NR Desc: COG3781: Predicted membrane protein
  misc_feature: Homolog of GI Number: 20140487 NR Desc: Hypothetical UPF0187 protein sll1024
  misc_feature: Homolog of GI Number: 55234580 NR Desc: ENSANGP00000028786
  misc_feature: Homolog of GI Number: 50926032 NR Desc: OSJNBa0067K08.24
  misc_feature: Homolog of GI Number: 2429362 NR Desc: proline rich protein
  misc_feature: Homolog of GI Number: 67987177 NR Desc: 4Fe
MPPIPSPNPVLSLLSAVPDWADAIQERRVRDRRPLYDHATWRHHRSSRRHLRHLLTSLSSRAILSLAPPVSAFTAFAAAIATYNTLLPAYALTASSLPYELTAPALALLLVFRTEASYARFDEGRKAWMRVLASAADLAGMLMRHPPPNNLHTGGAPNPGPGGRQADDEPLRRALVNYVLAFPVALKCHIICDSDVKGDLEGLLGEDDLSVVLASKHRPRCIIEFIAQSLQMLDLDEQKRSIMVSKLSCFLEGIGVCEQLMGIPIPLAYTRLTSRFLVLWHLTLPIILWEECKWIVVPATFISAASLFCIEEVGVLIEEPFPMLALDALCKQLHDGIKDVMEMQNSVHSRLVAKTATDHRGSRRENNGWPSSKREGAKID

SEQ ID NO: 9959 - DNA, 2413 bp, Zea mays
  misc_feature: Ceres CLONE ID no. 1574515
  misc_feature: Ceres CDNA ID no. 40041484
  CDS (323)..(2278): REFERENCED BY SEQ ID NO: 9960
acctagcgggcgatatctccccctctcgtctcagcacctcacgccgccggtgatcgccggtgaccacgggagcattacagcatcgccgagctcctccccggcgccacgttcagacgtccgtcgagcggtcggtgccgccgcgccgaggccgagtgttggatcctgggcggcgagcttctgggcgcggtcaccatggtggagcgagcgccgccagagaaaaaccccaggcccatttgactctagtctccggtctctctctccactctaactacagccggcccgcgtctcctcgaccatcaccaccttgacggtctccgtgaagatgatgagggtcatggacaagctcaaagggaagaagcgcggagattgtggtgactcctcgaggtcacggtcgactaggggttcaggtggtggggatacctcctctatgttgttccagggctctacagcgtcaaggcagcggctagagcagctccttggttgcatggaggagcaggggcgcgaagtggcaagccatagtgcacctgggcaagagcgcgaggtggcaggccatagtgcacctgggcaagagcgcgaggtggcatgccacaatgcacttgagccggagcgtgaggcgataggctcaagtggacctatgctagagcaggaccacaatgcatttgagcaagcgagcgaggcggcagaccacaatgcacctagtcaggaggacgagctggcacgccaaggttcaccaatgcgtgatgatgatgactatggggaggactacgatggagaggccgatggagaggccgatgacgaggttgttacaacgacacaggcaacaaacttcaggtttcggcggtcccttagagttccaccgacacaacccttggaccaacgtagggtcataaaccctgcaggagagaggagctgggtggaggtggcatggagtggcaaaggtcaccggacacccgttaacacagtgctgggatctatagctcgttttcactatccaggggtggtacaattcaacggggcagagacaggggcgtatcactgggctcactggggcctcaaaccatatggacccgaccgtactcaccaagacgcagtgtggtcatcgttttgggaacaatttagattggacgaaactgcaaacgaagaacatgcaaaacgtgtattccacaatgctgctagaaaagttataaatggttcaatgtcagatacacgggtcaaagctgttaccgtgtacttcaagaaagtgaagggtcaaagaatgaccaacaagcaggcatgtgaaatccacttgacagctgaggagtacaaacaaagtgaagtggactggctcactgctcatcctgaagcttgggtcaagctctgcgagtactgggcctcagatgagtacaaagtaatttcagatagaaatcgtttgaaccggaagagcaaaccgggcctccatcgatttggagcagatggatttattgggaaatcacaacgaatggaggctcgtgatggtgttgaaccccgattcattgacgtttacatggagggacaccgaggtccagatccagatcatcctgaagttttatgtgatgacagcgcgacagaaaagctgactcgttatgccgaggaggttaggaggaaagcaggagacgatgatctagattggagggaggcacctttcgatccggatgcagcatatgttgctggtggtgggctaccacatgggaggttggggatcggtgatggggttgtgagtcacgatagctttggtcgtcggtctgtttcctcggtggggagtagatctcgaacttcaacttcgagggaatcagagcttgatgagcaactaagacaacaacaacaacaagttcaacaactatctcaacaagttcagatgatgcagggaatgctgatgcagatgtatagtgctcagatgggatctccaatgggaccccagttcacccgtccgtcacaatctggacaaaccccaaacaccaacgaaacacagggttctgaaaccggacaaggaaacccacagatggacattcagtggtcgatgcctcctagaggacagattcttcctcctccacaaccaggtatgggatattggccgccaccaccatggggatatcctacacatccaatggggccttggggacgccccccatggccaacacagccacttccatcaccagcggattctggctctcatcaagtgactcctccccctcacgttgactttgcagacagatgtctcaattccagtggtgaagctacgaacaacaatccgatgtcctgatcgagagcgatggagctaatgtttgaacttgtgaactatggatgtgaacctgtgtgaatttgtgaacttatgtatttggacttatgtgaatttgcgaatttatatttggacttatgtcaaaaaaaaaaaaaaaaa

SEQ ID NO: 9960 - protein, 650 aa, Zea mays
  misc_feature: Ceres CLONE ID no. 1574515
  misc_feature: Ceres CDNA ID no. 40041484
  misc_feature: Homolog of GI Number: 168640 NR Desc: mosaic protein
  misc_feature: Homolog of GI Number: 10441444 NR Desc: transposase DOPA
  misc_feature: Homolog of GI Number: 77552112 NR Desc: autonomous transposable element en
  misc_feature: Homolog of GI Number: 77551339 NR Desc: transposon protein
MRVMDKLKGKKRGDCGDSSRSRSTRGSGGGDTSSMLFQGSTASRQRLEQLLGCMEEQGREVASHSAPGQEREVAGHSAPGQEREVACHNALEPEREAIGSSGPMLEQDHNAFEQASEAADHNAPSQEDELARQGSPMRDDDDYGEDYDGEADGEADDEVVTTTQATNFRFRRSLRVPPTQPLDQRRVINPAGERSWVEVAWSGKGHRTPVNTVLGSIARFHYPGVVQFNGAETGAYHWAHWGLKPYGPDRTHQDAVWSSFWEQFRLDETANEEHAKRVFHNAARKVINGSMSDTRVKAVTVYFKKVKGQRMTNKQACEIHLTAEEYKQSEVDWLTAHPEAWVKLCEYWASDEYKVISDRNRLNRKSKPGLHRFGADGFIGKSQRMEARDGVEPRFIDVYMEGHRGPDPDHPEVLCDDSATEKLTRYAEEVRRKAGDDDLDWREAPFDPDAAYVAGGGLPHGRLGIGDGVVSHDSFGRRSVSSVGSRSRTSTSRESELDEQLRQQQQQVQQLSQQVQMMQGMLMQMYSAQMGSPMGPQFTRPSQSGQTPNTNETQGSETGQGNPQMDIQWSMPPRGQILPPPQPGMGYWPPPPWGYPTHPMGPWGRPPWPTQPLPSPADSGSHQVTPPPHVDFADRCLNSSGEATNNNPMS

SEQ ID NO: 9961 - DNA, 2080 bp, Zea mays
  misc_feature: Ceres CLONE ID no. 1574620
  misc_feature: Ceres CDNA ID no. 40041485
  CDS (37)..(1665): REFERENCED BY SEQ ID NO: 9962
aaactcgtccgctcctgcttcccgccgccatcgcccatgacgccggcggcaccggcatccgccgcggacgcgcttgcgcagatcctgcaggacctcctgccttcggttctgctggccgcggcgtcggtcatggcgctccactcgcggtggcgcgcgctccaggcctccctcctcgcgttgcagtcctcgctcgtctccgcgcccgcctccgccccgtcccacccgctcttcgccgacctggtggccgcgcttctcccagccctccgttccctccacgcgctctctgtccggtgccaggaccctgggctccccggggggcggctgcggctacagagcgaccttgacatggtgcctgcgtcggcggctccgcacgcagacaagtccctcttcgtccgtgacgcctttgcccgcctccagatcgggtcgctggacctgaagctaaaggcgctagtgtcgctgctcgacctgctgggtgacgaccctactgcggaggccgcgcagatcgtcgccaccgaaggggacgttgcggcgctgctccgtttgcttgacgcgtcgtcccactcggcgctgcgggaccgtgcggtcacggccgtggcccaccttgcgaccgcctgcgctgcgtcccggagggtggtcttcgacgaaggcggactcggcccacttctgcgcgtgctcgactcaggctcaccgcccgccacgcgtgagcggtctgctgcggccattgtggccatcactggtgatgccggcagcgcgtgggctctatcggcttatggtggattgcccatcttgattaatgcttgccgtcctgggtctggatcccccgcattgcaggcatttgccgtggcggcaattaagaatgtttcttcagtcgatgatgtgcgctccactctggtggaggagagtggtttgcctgttcttgttgacctgcttgccagtggcactgctgagacgcagaagagtgctgctctctgcctctgggcacttgcttcgatgggagaccataagacacagaaccagattgtgcaagcaggtgcattgtcgccactcctacaagcactgcatatcgcctctgatcaggacctccatgattctgtactgcgtgctatacacgcacttacatcagcccctgctgccaccagaatcctttgttcatcgccactgttctttgcacgacttacagacctcatatgcagctctggtagcttcctgttgcaacaaatggctgctgatatgattgctgatcttgcacctactgtgagcgatgacacaaagaggtgcatggcaccatgcattggtacactgattaagctgatggaggtggctaagccagcaacaatacaggagtcagctggtcgtgcactgcttgctctgtttaccttgaagtctaataggaagggttttgtcagggatgagaagagtttaacaatatttgtgcggatgcttgatccccggtttcaggagactgataagaagtatccactctcgatctttctagttcttgccatgggtggcgggaacgggacacgacgacgacttgttgatgctggttcttgtcagcatctacagaagctggctgatgctgatgtgcctggtgcaaagaaggctttgcagaggatatctaacaatcgtcttaaaagtttgttttccataggatggcaaaactagtccatatgctgcactgggttgaagagcagcccaagactgcagatgtggagagcctctaccaaatgacagaagaacgctcaagtatttgtttgagtaggagttatgatagtacaagaacatcaagcgagagagttctcagtttctctgcggctaaaggtggccagtagatggtattattaagtacaagtagtatgttaacaagctggaagcttggacgtggcattttaggaagcgtctaaaagcttctttggtttgctcctttccgttttcccttgtattttagctttttttttctttctttcttctgttttataattgtggctctcaccatctactttgtgaaaatttgtttgtgttgatttggaatgaagcaaggaattgatctgtgtcaaaaaaataaaaaaaaaaaaaaaaa

SEQ ID NO: 9962 - protein, 542 aa, Zea mays
  misc_feature: Ceres CLONE ID no. 1574620
  misc_feature: Ceres CDNA ID no. 40041485
  misc_feature (321)..(362): Pfam Name: Arm PFAM Desc: Armadillo/beta
  misc_feature: Homolog of GI Number: 78708933 NR Desc: arm repeat containing protein
  misc_feature: Homolog of GI Number: 37536190 NR Desc: putative arm repeat containing protein
MTPAAPASAADALAQILQDLLPSVLLAAASVMALHSRWRALQASLLALQSSLVSAPASAPSHPLFADLVAALLPALRSLHALSVRCQDPGLPGGRLRLQSDLDMVPASAAPHADKSLFVRDAFARLQIGSLDLKLKALVSLLDLLGDDPTAEAAQIVATEGDVAALLRLLDASSHSALRDRAVTAVAHLATACAASRRVVFDEGGLGPLLRVLDSGSPPATRERSAAAIVAITGDAGSAWALSAYGGLPILINACRPGSGSPALQAFAVAAIKNVSSVDDVRSTLVEESGLPVLVDLLASGTAETQKSAALCLWALASMGDHKTQNQIVQAGALSPLLQALHIASDQDLHDSVLRAIHALTSAPAATRILCSSPLFFARLTDLICSSGSFLLQQMAADMIADLAPTVSDDTKRCMAPCIGTLIKLMEVAKPATIQESAGRALLALFTLKSNRKGFVRDEKSLTIFVRMLDPRFQETDKKYPLSIFLVLAMGGGNGTRRRLVDAGSCQHLQKLADADVPGAKKALQRISNNRLKSLFSIGWQN

SEQ ID NO: 9963 - DNA, 2390 bp, Zea mays
  misc_feature: Ceres CLONE ID no. 1574671
  misc_feature: Ceres CDNA ID no. 40041486
  CDS (207)..(2003): REFERENCED BY SEQ ID NO: 9964
aacaccattttttctgaccctggaagacctgaattggtcgatgctccatcctaatttgcattgacgtgtcaaataaagctagctagctttctacttgtaggattaggactggaagatgtcaagatgcaccgctagcgcgctgcaggtgccaaaatggcgcacgtctgccagcagaagctgaagctgaccctagctagctagcggtcatggaaatccttcgtcgtcgcctccgcgcgcgccgtgtctctcttgtcacgttcggcagcgaccagcgaccgcgccgccctgtccctgtgcaacgactcgatcgtctctctgggcaagtccttataaagttggcccgacgcgagagtgagacagatgccggccacaacgacgtactagctagcttagctagctcgttcgatcgcgtgcgtcgttccacaccgacgagcggcatggaggcctccgccaaactgcccgtcgtcgtcccgaagggcgtcggcggcatggacaacgacgacgtcgcggcggcgggcggcaagaagcaggcggcggcgggcaggtgggggttcgtgcagttcttcttcgtgctcgccgtcgtcttctgcgtgctcctctacgcaccgcgcgtcctcgtgctcagcccgtacgggtacagcatcgacgtcgggctcttcgcgccgacgccgacggcctcgtcggtgccgcagcgcgtcgccggaggcaatgcggcggcccttgacaaccaggtgcgctcgccgtgctcgtccatgcgcgaccacaccatctgctgcgaccgctccagcgtgcacacggacgtgtgcttcatggccggcgacgtgcgcacggacgccgcgtcgctgtcgctcctgctgttcccgccgcaccagcaggcgcagaacggcacctcggaagaggacaaagaggagagggtgcggccgtacccgcggaagtgggagcgcttcatcatggacaaggtccccgaggtgcggctccgtgtggcggcgccgcggcggccggatggggagcgggaggaggtggagcaccggtgcgacgtacggcacgacgcgccgttgctcgtcatgtccgcggggggctacaccggcaacctgttccacgcgttcaacgacgggttcctgccgtcgtggctgacggtgcagcatctccgccgccgcgtcgtgctgggggtggtctcgtacaacccctggtgggccggcatgttcgtcgaggtcatctccggcctctccgaccaccccgtggtggacctcctccacgacacgcggacgcactgcttcccgggcgccatcgtggggacccgctaccacggcatcctcatcgtggaccccgctaggctccgggacaacaagaccatcgtcgacttccaccagatgctcgccgacgcgtacgagaagccaccacgggagacgacaagaccagcacagcagcaggacctgcgggacgccgagcagcggcggcggccgaggctggggatcgtgtcgcgcaaggggacgcgggtgatcgagaaccaggcggcggtggcgcggctggcctcgtccgtggggttcgacgtggacatcctggagacggccaacgggctgccgctctcggcgtggtacgcgtcgctgcgtgcctgcgacgcgctcgtgggggtgcacggcgcggacctgaccaagttcctgttcctgcggccggggcgcgcgtcgctcacccagatcgcgccgctgggggtgtccccgatcgcgcgcgaagacttcggggaacccgccgcccggatggggctggcgtacgagcagtacgaggtgcgcgccggcgagagctcgctggcgcgcaggtacgcgccgggcgacgcggtgctgaccgacccggaggcggcgaagcgggacaaggggggatgggacttggtggcgcgcgtctacctcggcggccagaacgtgaccctggacctcgctaggttccggcagaccctggcgaggatgcacgcgcacgcgatgcggcagcggcgccggcaggagagactgtgatggccggccggctggcggcgacaggtgtacgtacgcacggcggctgtctatgctgttccggaccggtagagggagcgtgacggcaggcattggcagcttgttggaacgacgacgtgcatcaagtgttggggggcggtgagcatgcacgcatcaccgtgtattttggatggagatggaacaagagaggcgtgctttgtcgtgtgctgtttgcgtgacggattgggaatgccgacgaccactaaggtgacggcagcatatatataccccgatcgaatgccgcatacatatggtgtgacgatgcacccctgacactacgtatattgtaagtgcaacatattacaaattacatattttactaatatttgcgtgcaaaaaaaaaaaaaaaaa

SEQ ID NO: 9964 - protein, 504 aa, Zea mays
  misc_feature: Ceres CLONE ID no. 1574671
  misc_feature: Ceres CDNA ID no. 40041486
  misc_feature: Homolog of GI Number: 50904551 NR Desc: B1139B11.18
  misc_feature: Homolog of GI Number: 56409842 NR Desc: glycosyltransferase
  misc_feature: Homolog of GI Number: 50939743 NR Desc: symbiosis
  misc_feature: Homolog of GI Number: 56202275 NR Desc: HGA1
  misc_feature: Homolog of GI Number: 34905388 NR Desc: putative symbiosis
  misc_feature: Homolog of GI Number: 56409840 NR Desc: glycosyltransferase
  misc_feature: Homolog of GI Number: 77554062 NR Desc: HGA6
  misc_feature: Homolog of GI Number: 54291090 NR Desc: putative HGA6
  misc_feature: Homolog of GI Number: 34895336 NR Desc: P0494A10.22
  misc_feature: Homolog of GI Number: 55769891 NR Desc: putative HGA6
MDNDDVAAAGGKKQAAAGRWGFVQFFFVLAVVFCVLLYAPRVLVLSPYGYSIDVGLFAPTPTASSVPQRVAGGNAAALDNQVRSPCSSMRDHTICCDRSSVHTDVCFMAGDVRTDAASLSLLLFPPHQQAQNGTSEEDKEERVRPYPRKWERFIMDKVPEVRLRVAAPRRPDGEREEVEHRCDVRHDAPLLVMSAGGYTGNLFHAFNDGFLPSWLTVQHLRRRVVLGVVSYNPWWAGMFVEVISGLSDHPVVDLLHDTRTHCFPGAIVGTRYHGILIVDPARLRDNKTIVDFHQMLADAYEKPPRETTRPAQQQDLRDAEQRRRPRLGIVSRKGTRVIENQAAVARLASSVGFDVDILETANGLPLSAWYASLRACDALVGVHGADLTKFLFLRPGRASLTQIAPLGVSPIAREDFGEPAARMGLAYEQYEVRAGESSLARRYAPGDAVLTDPEAAKRDKGGWDLVARVYLGGQNVTLDLARFRQTLARMHAHAMRQRRRQERL

SEQ ID NO: 9965 - DNA, 2063 bp, Zea mays
  misc_feature: Ceres CLONE ID no. 1575702
  misc_feature: Ceres CDNA ID no. 35385349
  CDS (175)..(1860): REFERENCED BY SEQ ID NO: 9966
aacaaatacttgcaaccacaatttgttctgtttgcaagccacaaatatttgcaagccacaagccaagccaagcaaaaccctaagaaacccaccctccctccagtctcctcgacccccgccgccgccgccgccatcacaacccagagcaccccctccccaccccaccctgtcccgatggctgcggacgccgccgctgcggcgatgtccgcgacttccctctgcgacgatctcgagcccgccaccgtgcgcacccgcatccgcgatgtcctggccgcaggtgccgcgcgtgccggggaccgcgtcgtggtcggtgggtgggtccggacgggccgggagcaggggaagggctctttcgccttcctggagctcagcgacgggtcctgcgctgccacgcttcaggccatcgttgacgccgccgtgcacccgctagcgcgcctcaccgccaccggcacctccgtcctcgtcgagggcgtgatcaaggagccgcccgaggggaccaagcagaacgtcgagctgaaggtcagccgcgtgcttgaggtcggcgaggtcgatgccgccgtctacccgctgcccaagggcaaggtcaaactcacgctcgagaagctcagggacgtcgttcatctccgttcgcgcaccaacacgattggagcggttgctaggattaggcaccagttagcctatgcatcacacaggttctttgatgagaatggatttctctatgtacatacaccaataataactacgagtgactgtgaaggtgctggtgagatgtttcaagtgacaactttatttagccaggctgagaaaactgagaaggaattgagagagaacccaaaaccttctgattctgaaattgaggcagctaaagttcttgtcaaggaaaaaggtgatgtggtcgcacagcttaaagctgcaaaagccagcaaacaagagatatcaactgctgtcgatgagcttaatagggcaaaggaaattgtttcaaaactggaggagaggttcaagttaaagcctgggattccacgcaaggatgatggttcaatagcttttgaaaatgacttcttcaaacgtcaagcttttttgacagtgtctggacagcttcaggttgagacatatgcatgtgctcttagtagcgtttatacctttggaccaacattccgggcagagaactcacatacgtcacgacatttggcagagttttggatggttgaaccggaaatcgcatttgcaaacttgcaggatgacatgaactgtgcagaaaaatatgtacagtacctttgcaagtggctgcttgaccattgccaggaagatatggagtttatggtgaaaaattatgataagagtgcaattgaacgcctggagcttgtttcgtcaactccttttgtgcggatttcatacacaaaggctgtggagctcttgaaaaatgttaccgacaagaagtttgacaacaaagttgaatggggaattgatttagcctctgagcatgaaaggtatttaacagaggatatatttaagaagccagttattgtctataactatccgaaaggaataaaggcattttatatgagactcaatgatgatgacaagacggtggctgcaatggatgttcttgtgcctaaggttggtgaattgattggtggaagccaaagggaggaacggttagatgttctggaacagaggatacttgatgctggcctgcctttggaaccctatgaatggtacttggacctccgtcgctttggatctgtaaagcacagtggttttgggttgggttttgaaaggatgattctatttgcaaccggaatggagaacatcagagatgttatacccttcccaaggtacccaggaagggctgatctgtgatctttggagacattggttaaacagatgcgagttgaattcaacacgcgactagtgattttgatatgttttcaccgttaagtttctacttcctaatttgcacattttaattataaattgtggaactggtacggttgtcaaaaatcatgtaattttctggttgtattttattatatttgtatctctgatcaaaaaaaaaaaaaaaa

SEQ ID NO: 9966 - protein, 561 aa, Zea mays
  misc_feature: Ceres CLONE ID no. 1575702
  misc_feature: Ceres CDNA ID no. 35385349
  misc_feature (238)..(261): Pfam Name: WHEP PFAM Desc: WHEP
  misc_feature (295)..(557): Pfam Name: tRNA PFAM Desc: tRNA synthetases class II
  misc_feature (43)..(122): Pfam Name: tRNA_anti PFAM Desc: OB
  misc_feature: Homolog of GI Number: 19310458 NR Desc: AT4g17300/dl4685w
  misc_feature: Homolog of GI Number: 59798542 NR Desc: Asparaginyl
  misc_feature: Homolog of GI Number: 10176772 NR Desc: SYNC1 protein
  misc_feature: Homolog of GI Number: 5902407 NR Desc: Similar to  asparaginyl
  misc_feature: Homolog of GI Number: 2664210 NR Desc: asparaginyl
  misc_feature: Homolog of GI Number: 34914792 NR Desc: putative asparaginyl
  misc_feature: Homolog of GI Number: 59798569 NR Desc: Asparaginyl
  misc_feature: Homolog of GI Number: 71674182 NR Desc: Asparaginyl
  misc_feature: Homolog of GI Number: 75429591 NR Desc: asparaginyl
  misc_feature: Homolog of GI Number: 12514105 NR Desc: asparagine tRNA synthetase
  misc_feature: Useful for making bigger plants
  misc_feature: Useful for making plants with increased biomass
MAADAAAAAMSATSLCDDLEPATVRTRIRDVLAAGAARAGDRVVVGGWVRTGREQGKGSFAFLELSDGSCAATLQAIVDAAVHPLARLTATGTSVLVEGVIKEPPEGTKQNVELKVSRVLEVGEVDAAVYPLPKGKVKLTLEKLRDVVHLRSRTNTIGAVARIRHQLAYASHRFFDENGFLYVHTPIITTSDCEGAGEMFQVTTLFSQAEKTEKELRENPKPSDSEIEAAKVLVKEKGDVVAQLKAAKASKQEISTAVDELNRAKEIVSKLEERFKLKPGIPRKDDGSIAFENDFFKRQAFLTVSGQLQVETYACALSSVYTFGPTFRAENSHTSRHLAEFWMVEPEIAFANLQDDMNCAEKYVQYLCKWLLDHCQEDMEFMVKNYDKSAIERLELVSSTPFVRISYTKAVELLKNVTDKKFDNKVEWGIDLASEHERYLTEDIFKKPVIVYNYPKGIKAFYMRLNDDDKTVAAMDVLVPKVGELIGGSQREERLDVLEQRILDAGLPLEPYEWYLDLRRFGSVKHSGFGLGFERMILFATGMENIRDVIPFPRYPGRADL

SEQ ID NO: 9967 - DNA, 2543 bp, Zea mays
  misc_feature: Ceres CLONE ID no. 1575810
  misc_feature: Ceres CDNA ID no. 40041487
  CDS (329)..(2146): REFERENCED BY SEQ ID NO: 9968
aaaccgtcctccctcctccacctccacctccacctccaccagctgcactccccacgccgcgcacccgcccctctccccctcctccagctccgaaccggaaacgcgggggtaccgcgccgtccgcgtggcgtgtccggagagatcccacgacccggcgggcggcgctgcgaggctgaaggcgcggcggcggatttaagggcctcgccggctcgggatctccgcgcgatcgccgctgggccgcgcgctcgaggtatacattggttgttgcagcaagctggtttcttgagatccatattgatgtggtttgttctggaaatttttattcttcatggatgctattaagagccatgcaaagaaggttgatcttgttgatgagactctaagaccaccactagttccatccgagaagcacaatgctttccgagtgaggaatgttgcatccaggtgcaaaactgatctggctgatgccactaagataagaagatgtacatcaccaagttttggccagacctcagcaattgaaggcacaccagcacccaaaagagctcagtcagtagatagaagaaggccgacaccttcgacccctccctctaaggtgtcaacaccctcaacccctgtgtcaaggtccatcacaccagttcgtgataccactagagacttacacaagagttccaagcgtatagcaagcacaaaggctcctgatggcttgtggccagcaatgcgtaacttgtcttcctctttccaatcggaatctgtggttgcacctactactagaaacgataaggtagtcacgtctttggattgtagcaaggggcaagtgagtgttctaacggagaggaagagaagtccttttagaaggaaaaacattggtgaacattgtgagaatgctcaaccttcagaggagccccctaagaggttaattgagcaacacagatggccagccatgatagctgggcaggcgccgaagaatctcatgtcaagaagcattgacctttcggacaaagctaacataccggtcccatcatcaaatacatcaagaggtctttcaccaaggaagacgccttctgtcagacctgtgccatcatcaaatacatcaagaggcctttcaccaaggaagaccccttctgtcggaccagtcccatcatcaaatacatcaagatgcccttcaccaatgaagaccccttctgttgaagcttcagtgaaactgtcaaatcagtcattggatgaagtggcaaggagtttggctattcaatcaagcagaagagatgataaggtagattcacagacaatagagagatccaaatctttgagccgaccaaacagaacagttacttttcctgttccaattctacaacgctcatcatcaccaagcagagcattgccagctacgtcctcaacttccagggcctttcagagcccatctcgggcaaggccatcaacaccctgtcagtcccaaagtgctggagctatccaatcaagtgttccatcttctcttattaactacatggttgatgcgcggaaaggaaagaagaatgccagccaaatcgaaaatatccaccaagtgcgtttattgcacaatagacatttacagtggctctttataaatgcttatgcagaagatgctttatcttttcaaaaggctactgttgagaataccatgtataatgtttggaggaatactgtaaacctgcgggattctgttaatatgaaaagaataatggtgcaacacttccaacaagaactcaggctttacaacattctgaaagagcagattgcttaccttgaacaatggccaacgctagaaagggagaatagtatctctttactaggggcaactgaggctctgaaagcaagcaccctgcgcctgccagttacattgggagcaaaggctaacacaattgctctcaagaacgctgtaagctcagctgttgatgtcatgcaagttttgggctcatctgtttgctgcattcattcaaagatcacggacagcacatccttggtttcagaactctctgtcatagcaggacaagagaagatcatgcttgacgaatgccgagaactcttagctacagctgcaaaactgcaggtgcaggagtcgagcctacggacacatcttgtgcaacagagacaaaggcttcaggattgaaatggcaacctgaataagatgcagaagccccaggccatgacattgaacaggtaaattgtgcaagttgaactgcaaacagaaaaggaatctgtagaatctaaacaataggaacaaaacaaatgttaaacatcccctggagattcatggtgtgatgcgacaactaactacccgcagtgcatagatatgacaggtttactgaaaaaacctcatcatatgtaaatggttttcaccatataatgcactcccggccttttctagtttttttttttatttttttgttccttgtataggatccctcctctttgccattgtattttttgacattttgaaagaaatacatagataatggatgagctaagatggtgatatcatttttttccaaaaaaaaaaaaaaaaa

SEQ ID NO: 9968 - protein, 605 aa, Zea mays
  misc_feature: Ceres CLONE ID no. 1575810
  misc_feature: Ceres CDNA ID no. 40041487
  misc_feature: Homolog of GI Number: 50726125 NR Desc: streptococcal hemagglutinin
  misc_feature: Homolog of GI Number: 50915552 NR Desc: putative streptococcal hemagglutinin
  misc_feature: Homolog of GI Number: 50918953 NR Desc: putative proteophosphoglycan
  misc_feature: Homolog of GI Number: 34915324 NR Desc: proteophosphoglycan
  misc_feature: Homolog of GI Number: 50251177 NR Desc: streptococcal hemagglutinin
  misc_feature: Homolog of GI Number: 72547023 NR Desc: proteophosphoglycan ppg4
  misc_feature: Homolog of GI Number: 72547036 NR Desc: proteophosphoglycan 5
MDAIKSHAKKVDLVDETLRPPLVPSEKHNAFRVRNVASRCKTDLADATKIRRCTSPSFGQTSAIEGTPAPKRAQSVDRRRPTPSTPPSKVSTPSTPVSRSITPVRDTTRDLHKSSKRIASTKAPDGLWPAMRNLSSSFQSESVVAPTTRNDKVVTSLDCSKGQVSVLTERKRSPFRRKNIGEHCENAQPSEEPPKRLIEQHRWPAMIAGQAPKNLMSRSIDLSDKANIPVPSSNTSRGLSPRKTPSVRPVPSSNTSRGLSPRKTPSVGPVPSSNTSRCPSPMKTPSVEASVKLSNQSLDEVARSLAIQSSRRDDKVDSQTIERSKSLSRPNRTVTFPVPILQRSSSPSRALPATSSTSRAFQSPSRARPSTPCQSQSAGAIQSSVPSSLINYMVDARKGKKNASQIENIHQVRLLHNRHLQWLFINAYAEDALSFQKATVENTMYNVWRNTVNLRDSVNMKRIMVQHFQQELRLYNILKEQIAYLEQWPTLERENSISLLGATEALKASTLRLPVTLGAKANTIALKNAVSSAVDVMQVLGSSVCCIHSKITDSTSLVSELSVIAGQEKIMLDECRELLATAAKLQVQESSLRTHLVQQRQRLQD

SEQ ID NO: 9969 - DNA, 2450 bp, Zea mays
  misc_feature: Ceres CLONE ID no. 1575937
  misc_feature: Ceres CDNA ID no. 40352052
  CDS (141)..(2306): REFERENCED BY SEQ ID NO: 9970
aaccgcatcgaccggacggtctctctctcgtctctcccgacgcgcctccacggccggccccgccccggctcgctagcctcctcccactcccagtaccagcccccgcccctccagcaccaccagcagctcgccttcggaccatgagacgggtcggaggagacctgcagggcgacggcacgacgcctcggtccgcggcggcggggcaggccatgatggagcttcaggccaacgggtcggccgccgtcgggggcgccatggtggtggggctcagcccgctcagcgaggccctgtggcgggacagcaaggcgctcccgccgggggccggccccgccgcgctcatcggcgacgtgtccgccaggctcacgtggaaggacctctgcgtcaccgtggctctgggccccggcaagacgcagaccgtgctggacgagctcaccgggtacgcggagcccgggtcgctgaccgcgctcatggggccctcggggtccggcaagtccaccctgctcgacgccctcgccggccgcctcgccgccaacgccttcctctccggcaacgtgctcctcaacggccgcaaggccaagctctccttcggcgccgcggcgtacgtgacgcaggacgacaacctgatcgggacgctgacggtgcgcgagacgatcggctactcggcgctgctgcggctgccggacaagatgccgcgggaggacaagcgcgcgctggtggagggcaccatcgtcgagatggggctgcaggactgcgccgacaccgtcatcggcaactggcacctccgcggggtcagcggcggcgagaagcgccgcgtcagcatcgcgctcgagctactcatgcgcccgcgcctcctcttcctcgacgagcccaccagcggcctcgacagctcgtctgcgttcttcgtgacgcagacgctgcggggcctggcgagggacggcaggacggtgattgcttccatccaccagcccagcagcgaggtgttcgagctcttcgacatgctcttcctgctatccgggggcaagaccgtctacttcggacaagcatcgcaagcatgcgagttctttgctcaagccggtttcccttgcccggctctgcggaatccgtccgaccatttcctgaggtgcgtcaactcggacttcgacaaggtgaaggccacccttaaaggatcgatgaaagcaagggtcgagaggtccgacgatccacttgacaggatgaccacatcggaggccatcaggaagttggttgcatcctacagcaggtcccagtactactacgccgcaagggagaaagtaaatgacatctcgcgaatgaaaggaaccgtgctggattccggtggcagccaggccagcttcctgatgcaggcctgcaccctgaccaagcgctccttcatcaacatgtcgcgggactttgggtactactggctcaggctcctcatctacctcctcgtcaccgtttgcatcggcacgatctacctggacgtcggcaccaaatacacatccatcctggccagggctgcctgttccgcgttcgtctttgggttcgttacgttcatgtccattggaggattcccttcgttcgttgaagaaatgaaggtcttccagcgggaacggctgaacgggcactacggtgtcgcggcgtttgtcatcagcaacaccatctcggcaacgccgttcctgattctgatatgcttcttgtcgggaaccatatgctacttcatggtgcgcctccatcctggcttcgagcactacatcttcttcgtcttgaacctgtacgccagcgttacggtggtcgagagcttgatgatggcgattgccagtgtcattcccaatttcctcatgggtatcatcataggggccgggattcagggaatattcatgctggtctctggctacttcagacttccatacgacatcccgaagcccttttggagataccccatgcagtacatcagcttccactactgggcactgcagggccagtgccagaacgacatgaagggcctcgtgttcgacaaccagtacccggaccaacccaagatccccggggacttcatcctcaagtacatcttccagatcaacgtggaccgttccaagtggatcgacctgtcggtcattttcagcatgatcttcatctaccgcatcctcttcttcctcatgatcaagatcaacgaggacgcgctgccgtggatccgcggccacatcgcgaggaagaggatgcagaagaagggccctacccccaccatgggcaagacgccttcgctgagaggctacgtcgtcgatccggagctcggttccaacgagggctagaggtcgtgcttgttcttttgggtagcggaaaaaaaatagggtgtttctcccccccggctcttggtgttatattgtatatttaagatcaggggataaaaaaactggtatcacacgttttggaaaaaagaaaaaaaaaaaaaaaaa

SEQ ID NO: 9970 - protein, 698 aa, Zea mays
  misc_feature: Ceres CLONE ID no. 1575937
  misc_feature: Ceres CDNA ID no. 40352052
  misc_feature (383)..(595): Pfam Name: ABC2_membrane PFAM Desc: ABC
MMELQANGSAAVGGAMVVGLSPLSEALWRDSKALPPGAGPAALIGDVSARLTWKDLCVTVALGPGKTQTVLDELTGYAEPGSLTALMGPSGSGKSTLLDALAGRLAANAFLSGNVLLNGRKAKLSFGAAAYVTQDDNLIGTLTVRETIGYSALLRLPDKMPREDKRALVEGTIVEMGLQDCADTVIGNWHLRGVSGGEKRRVSIALELLMRPRLLFLDEPTSGLDSSSAFFVTQTLRGLARDGRTVIASIHQPSSEVFELFDMLFLLSGGKTVYFGQASQACEFFAQAGFPCPALRNPSDHFLRCVNSDFDKVKATLKGSMKARVERSDDPLDRMTTSEAIRKLVASYSRSQYYYAAREKVNDISRMKGTVLDSGGSQASFLMQACTLTKRSFINMSRDFGYYWLRLLIYLLVTVCIGTIYLDVGTKYTSILARAACSAFVFGFVTFMSIGGFPSFVEEMKVFQRERLNGHYGVAAFVISNTISATPFLILICFLSGTICYFMVRLHPGFEHYIFFVLNLYASVTVVESLMMAIASVIPNFLMGIIIGAGIQGIFMLVSGYFRLPYDIPKPFWRYPMQYISFHYWALQGQCQNDMKGLVFDNQYPDQPKIPGDFILKYIFQINVDRSKWIDLSVIFSMIFIYRILFFLMIKINEDALPWIRGHIARKRMQKKGPTPTMGKTPSLRGYVVDPELGSNEG

SEQ ID NO: 9971 - DNA, 2241 bp, Zea mays
  misc_feature: Ceres CLONE ID no. 1577747
  misc_feature: Ceres CDNA ID no. 25891172
  CDS (119)..(1972): REFERENCED BY SEQ ID NO: 9972
agtccccacacgcgactaaaatttacatcacctcgaacggcggcggcggcggcggcggcggtttctcatctgcggcgcctcttcgatgctgtttgctttgccaaggctttgatcccagatggggatctcgtcgggtgcagacttccaccagcagcccaccccacaggccgtgctgccgccacgcccccatggccgtgcgccgacgctgcagacgcctctctccctggctggttccgcctcgccggagcaggtcgggtcgcctccggacacacaggagccgctgtcgaactccgacgcggggcatgactccgccacagagagcgccagctcacgggagacttggcctggggagcccggcaagagtggtggcggcgacgctcctcccgtggcatcagcaccgataactgcactgaggatagctgataataaggagaaggaggtggttggtaatggcgtcgccgagctgcaggcctttcggagtaggatcccgagtgcaggccggatgactctcagggaggttgcttgggacagggtggacctcgttgctgagaagatgaagggtatgagcgatgagctgctggacgaaaccaaagccgagctgcagtcgattctggaagggactggcggtcagcaccagattcaggagttcatgtacctgcagaagcttcttcagggcagggttgatctcaccctgcccatccttttgatggctcaccatgtgcagctggagatcctggttgccatcaagactgggatacaggcgttcttgcacccgagcgtcgacataccccagatccgcctcgctgagattttcctgtacaagaggtgccgcaacattgcttgccagagtgctgtgcctgctgaggagtgcaagtgtaacatatgcagtaacaggaacgggttttgtaatctctgcatgtgcgtgatctgcaataagtttgattttgaggtcaatacgtgccgctgggttgggtgtgatatctgctcgcactggactcacacagactgtgcaattcgtgatggaaagattgggactgggcagacgattaagaacggcgttggccatgcagagatgcttttccggtgccaggcctgccagaggacatctgaactgtttggatgggttagggatgtctttcagcaatgtgcacccaattgggacagggatgccttgctgcgtgagcttgactatgtttgcaagatattccgtctaagtgaggactcaaaggggaggaaattgttcagaaaatgtgctgagctagttgaaagattgaggggtggttctgctgaatcaatgactcctagaattctgctacaagcgctgcaagagctggacattgattcctccaagaactttgagcaccaagagccagggcggctgatcactccccaggaggcctgcaaccggatcgctgaggtcgtccaggaagcagtgaggaagatggagatggtggccgaagagaaattgcggacgtacaaacgcgcccgcctcgctgtggaggcgtgcgacagggagctggaggagaaggcccgggaggcccaggagctgaaggtggagcggctgcggaagctgcagcaggcggaggagctggagagcatcatccggctgaagcaggcggagtcggagatgttccagctgaaggcgagcgaggcccaggaggaggccgagcggctgcggagcgtcgcgctggcgaagcggaagtcggaggcggcggggcaggactacgcgagcatgtacctcaagcggcgcctcgaggaggccgaggccgagaagcagtacatcttcgagaagatcaagctgcaggagaaccagcatgccacgagcagcagcggcgggggtgcccgcctcggcggcggagctccctccgccggggaaccctcgcaggcgatgatgctgtccaagatccaggacctgctgaagaacgtgcgcagcgtgccgtccggcaagccagatgggcagcgctccaagtagcagtagcgtcgtggggtgggctcggctgggcgggaactgccactccatcggcctgctggttgttactacttgttattagacgtagtagttgttaactagcagtgtagtaagtttacatgatatatatactgcatttttttggggggaacaaaatgttgattacctgcgcagcattgtcctaggtgtgtttagtagcgacttgttttcactgattatgtgatatgtatgaattgtatgtgcaggtaaaaaaagaaaaaaaaaaaaaaaaa

SEQ ID NO: 9972 - protein, 617 aa, Zea mays
  misc_feature: Ceres CLONE ID no. 1577747
  misc_feature: Ceres CDNA ID no. 25891172
  misc_feature (267)..(297): Pfam Name: PHD PFAM Desc: PHD
  misc_feature: Homolog of GI Number: 45544877 NR Desc: CONSTANS interacting protein 6
  misc_feature: Homolog of GI Number: 8778236 NR Desc: F10B6.14
  misc_feature: Homolog of GI Number: 38197755 NR Desc: major ampullate spidroin
  misc_feature: Homolog of GI Number: 66780099 NR Desc: PE
  misc_feature: Homolog of GI Number: 320926 NR Desc: antigen 5401
  misc_feature: Homolog of GI Number: 13562008 NR Desc: major ampullate spidroin 2
  misc_feature: Homolog of GI Number: 2911272 NR Desc: spidroin 2
MGISSGADFHQQPTPQAVLPPRPHGRAPTLQTPLSLAGSASPEQVGSPPDTQEPLSNSDAGHDSATESASSRETWPGEPGKSGGGDAPPVASAPITALRIADNKEKEVVGNGVAELQAFRSRIPSAGRMTLREVAWDRVDLVAEKMKGMSDELLDETKAELQSILEGTGGQHQIQEFMYLQKLLQGRVDLTLPILLMAHHVQLEILVAIKTGIQAFLHPSVDIPQIRLAEIFLYKRCRNIACQSAVPAEECKCNICSNRNGFCNLCMCVICNKFDFEVNTCRWVGCDICSHWTHTDCAIRDGKIGTGQTIKNGVGHAEMLFRCQACQRTSELFGWVRDVFQQCAPNWDRDALLRELDYVCKIFRLSEDSKGRKLFRKCAELVERLRGGSAESMTPRILLQALQELDIDSSKNFEHQEPGRLITPQEACNRIAEVVQEAVRKMEMVAEEKLRTYKRARLAVEACDRELEEKAREAQELKVERLRKLQQAEELESIIRLKQAESEMFQLKASEAQEEAERLRSVALAKRKSEAAGQDYASMYLKRRLEEAEAEKQYIFEKIKLQENQHATSSSGGGARLGGGAPSAGEPSQAMMLSKIQDLLKNVRSVPSGKPDGQRSK

SEQ ID NO: 9973 - DNA, 2144 bp, Zea mays
  misc_feature: Ceres CLONE ID no. 1577942
  misc_feature: Ceres CDNA ID no. 40041488
  CDS (172)..(1851): REFERENCED BY SEQ ID NO: 9974
aaagcaacaaatacatttgcgtagcagacatcgctgcccgtgtctgtgtctccattcacctcgctgctcagtctgacacggaaccgagcggaaaacccaggccagctcccgataagaaatcctcgagtcgaccagtcccccataggccgtagaccagagcagtagaccgccatggcgaaccgcagcaagcagctcgttaccaccgcactgccgctcgcggcggcagcagcagcctcgctcgccgtcgtgctcctgctctgctccacgggctcatcggaagccgacggatacctcgggcgcgtgggtgcgccgtggggccgtaccctcacggtcctcccattcagccccgcggacctgctgcccctcctgccgcggggcgtcgccatggccgcgctccgggcgctccgcggcgtctcggacatcttcccggtgttcgtcggcgccgcgtcggccggcgggtcgggctcggtgcccggcagcggggggacggtgagatggaagagggcctgcttctacgagaacgaggcgtggctggtgttccacaacgagagcgggtccaagtacggcggcggcacactccatatcaagacatccaaagcacacagctggacttgcatagatctgtatgtatttgcaacaccatacagagttacatgggattactactttctggggcgagagcacactcttgatatcaaagaatgggaaagcgaggctgagtatgagtatgtgaaacgtaatggtgtgtccatcttcctcatgccatctggaacaattggcacacttcgagcactctgggatgtcttccctctgttcacaaatactgcatggggtgagaacgcgaatcttgcttttctcgagaagcatatgggtgccacctttgaggaacgcccaaaaccttgggtctcagagttaaatcctgatgatatccagtcgggagatttcttggttttatcgaagattcgcgggcgttggggtggttttgaaacactggagaagtgggttactggcgcttatgctggccatactgcggtttgcctgagggactccgatggaaagctttgggttggggaatctggtaatgaaaatgaacagggagaagatgttattgctatcctgccctgggaggaatggtgggagtttgaagtgacaaaggatgactcaaatcctcagattgcactgcttcctttgcatccagatctgcgggcaaaatttaatgagacagcagcttggatttatgcaaaaagcatggaggggaaaccttatgggtatcacaatatgatatttagctggattgataccatcagtgataattatccaccaccattagatgctcatgtggttgcttctgttatgactgtatggagcaagcttcaaccagagtatgctgctaatatgtggaaagaagcccttaacaaacggcttggaactaagggtcttgacctttctgaaatcatagtggaatcagagaaacgtgggataacatttgacaagttactatctgttcctgagaacgatagctgggtctatgaagatggtcagtcagcatcttgtgtggctttcgtccttatgatgtacaaggaggctggactctttgaccctattaccagctctattgaagttactgaattcacaataaaagatgcttatatcctcaacttttttgaggacaactcgacccgacttccggagtggtgcaacaaggatgacgatgtgaagcttcccttttgccagatcaagggcaagtaccggatggagctgcctggatacaacaccatgaaaccctatgcccacatgaacgagagatgtccatccctgcctccagattacaacaggactaagggctgctagtgctaaccagatatgcgtgtgcattttattcacgctcccttgtagccattgcttcagctgtaaatattatacatttatactagtataatagtactatgggggtatgtactgcttgcccttgagaagcgtgtattgattgtaggcaacttatgtgagacttcctcgaataaggaagaacatgaatcacacaaatgtacagtaaccatgcttgatctttttatcagtgtttacttatgtaacagtaaaaaatgtataatgtatgtgcgcctttggaccaaaaaaaaaaaaaaaaa

SEQ ID NO: 9974 - protein, 559 aa, Zea mays
  misc_feature: Ceres CLONE ID no. 1577942
  misc_feature: Ceres CDNA ID no. 40041488
  misc_feature: Homolog of GI Number: 2194125 NR Desc: ESTs gbR30459
MANRSKQLVTTALPLAAAAAASLAVVLLLCSTGSSEADGYLGRVGAPWGRTLTVLPFSPADLLPLLPRGVAMAALRALRGVSDIFPVFVGAASAGGSGSVPGSGGTVRWKRACFYENEAWLVFHNESGSKYGGGTLHIKTSKAHSWTCIDLYVFATPYRVTWDYYFLGREHTLDIKEWESEAEYEYVKRNGVSIFLMPSGTIGTLRALWDVFPLFTNTAWGENANLAFLEKHMGATFEERPKPWVSELNPDDIQSGDFLVLSKIRGRWGGFETLEKWVTGAYAGHTAVCLRDSDGKLWVGESGNENEQGEDVIAILPWEEWWEFEVTKDDSNPQIALLPLHPDLRAKFNETAAWIYAKSMEGKPYGYHNMIFSWIDTISDNYPPPLDAHVVASVMTVWSKLQPEYAANMWKEALNKRLGTKGLDLSEIIVESEKRGITFDKLLSVPENDSWVYEDGQSASCVAFVLMMYKEAGLFDPITSSIEVTEFTIKDAYILNFFEDNSTRLPEWCNKDDDVKLPFCQIKGKYRMELPGYNTMKPYAHMNERCPSLPPDYNRTKGC

SEQ ID NO: 9975 - DNA, 2038 bp, Zea mays
  misc_feature: Ceres CLONE ID no. 1578373
  misc_feature: Ceres CDNA ID no. 25403193
  CDS (253)..(1773): REFERENCED BY SEQ ID NO: 9976
agacgaagtggggcgcctagcttcttactagttttttttttccttgcgcaaagcttgcacttgctgagagagagggagagagaaatccagagataaaggcgcttcattcattccctctcctgctttctctctccaacccatccgtcctctctctccacacataaaaaccaacgaagcgggcgagtgatcaggcagaggcagcaggcaggaaataaatttgaagaaagctagacctctgatcagcaggagctcatgggcgccatgatggcctccataaccagcgagctcctcttcttccttcccttcatcctgctggccctcctcgccttgtacaccaccaccgtcgccaaatgccacggcacccacccgtggcgccgtcagaagaagaagcggcccaacctgcccccgggcgcccgcggatggcccttggtcggcgaaactttcggctacctccgcgcccacccggccacctccgtgggccgcttcatggagcggcatgtcgcacggtacgggaagatataccggtcgagcctgttcggggagcggacggtggtgtcggcggacgcggggctgaaccgctacatcctgcagaacgaggggcggctgttcgagtgcagctacccgcgcagcatcggcggcatcctgggcaagtggtccatgctggtgctcgtgggcgacgcgcaccgcgagatgcgcgctatctcgctcaacttcctcagctccgtccgcctccgcgccgtgctgctccccgaggtggagcgccacaccctgctggtcctccgctcgtggccgccctccgacggcaccttctccgcccagcacgaagccaagaagttcacgtttaacctgatggcgaagaacataatgagcatggaccccggcgaggaggagacggagcggctgcggctggagtacatcaccttcatgaagggcgtcgtgtcagcgccgctcaacttcccgggcacggcctactggaaggcgctcaagtcgcgcgcgtccatacttggagtgatagagaggaagatggaggacaggcttgagaagatgagcagggagaagtcaagcgtggaggaggacgaccttcttggatgggccctgaagcaatccaacctgtccaaggaacagatcctggacctcttgctgagcctgctcttcgcggggcacgagacttcgtccatggcgctcgccctcgccatcttcttcctcgaagggtgccctaaggccgtgcaagaactccgggaggagcatctcctgattgctaggagacaaaggctaaggggggcgtccaaattgagctgggaagactacaaggaaatggttttcacgcagtgtgttataaacgagacattgcggctcggcaacgtggtcaggttcctgcaccggaaggtcatccgagatgtacactacaatgggtacgacataccgcgggggtggaaaatcctgccggttctagcggcggtgcacctggactcgtcgctgtacgaggaccccagccggttcaacccttggagatggaagagcaacaacgcgccaagcagcttcatgccgtacggcggcgggccgcggctgtgcgccgggtcggagctggccaagctggagatggccatcttcctgcaccacctggtgctcaacttccggtgggagctggcggagccggaccaggccttcgtctaccctttcgtcgacttccccaagggcctcccgatcagggtccagcgggtcgccgacgaccaaggccatcgtagcgttttgaccgagagcacaagaggctgagagggaggaggcagttcaatttttcgttgcattttgagggctgtggtctcgtgttttatgtagattgtgattattattattatacatactaaaacaagatagaagcacgtatagacagagcaaagaggaggatggtccaaaagtgtttggggtagataaaatgtgtactcactagggttgtaataaggccggtccatggcccatgtcaagtaatactagagatatatagaatatagtggatatccaacaaaaaaaaaaaaaaaaa

SEQ ID NO: 9976 - protein, 502 aa, Zea mays
  misc_feature: Ceres CLONE ID no. 1578373
  misc_feature: Ceres CDNA ID no. 25403193
  misc_feature (47)..(97): Pfam Name: p450 PFAM Desc: Cytochrome P450
  misc_feature: Homolog of GI Number: 34902330 NR Desc: Putative steroid 22
  misc_feature: Homolog of GI Number: 60677681 NR Desc: cytochrome P450
  misc_feature: Homolog of GI Number: 71834076 NR Desc: steroid 22
  misc_feature: Homolog of GI Number: 50058152 NR Desc: P450
  misc_feature: Homolog of GI Number: 21593119 NR Desc: cytochrome P450 90A1
  misc_feature: Homolog of GI Number: 45260636 NR Desc: cytochrome P450
  misc_feature: Homolog of GI Number: 22326806 NR Desc: cytochrome P450 family protein
  misc_feature: Homolog of GI Number: 9587211 NR Desc: cytochrome P450
  misc_feature: Homolog of GI Number: 19699122 NR Desc: AT3g50660/T3A5_40
  misc_feature: Homolog of GI Number: 2935342 NR Desc: steroid 22
  misc_feature: Useful for delaying flowering time
  misc_feature: Useful for increasing chlorophyll and photosynthetic capacity
  misc_feature: Useful for making larger plants
  misc_feature: Useful for making lethal plants for genetic confinement systems
  misc_feature: Useful for making ornamental plants with modified leaves
  misc_feature: Useful for making plants that grow better in shade
  misc_feature: Useful for making plants with altered leaf shape eg curled leaves
  misc_feature: Useful for making plants with increased biomass and foliage
  misc_feature: Useful for making shorter plants
  misc_feature: Useful for making smaller plants
MASITSELLFFLPFILLALLALYTTTVAKCHGTHPWRRQKKKRPNLPPGARGWPLVGETFGYLRAHPATSVGRFMERHVARYGKIYRSSLFGERTVVSADAGLNRYILQNEGRLFECSYPRSIGGILGKWSMLVLVGDAHREMRAISLNFLSSVRLRAVLLPEVERHTLLVLRSWPPSDGTFSAQHEAKKFTFNLMAKNIMSMDPGEEETERLRLEYITFMKGVVSAPLNFPGTAYWKALKSRASILGVIERKMEDRLEKMSREKSSVEEDDLLGWALKQSNLSKEQILDLLLSLLFAGHETSSMALALAIFFLEGCPKAVQELREEHLLIARRQRLRGASKLSWEDYKEMVFTQCVINETLRLGNVVRFLHRKVIRDVHYNGYDIPRGWKILPVLAAVHLDSSLYEDPSRFNPWRWKSNNAPSSFMPYGGGPRLCAGSELAKLEMAIFLHHLVLNFRWELAEPDQAFVYPFVDFPKGLPIRVQRVADDQGHRSVLTESTRG

SEQ ID NO: 9977 - DNA, 2442 bp, Zea mays
  misc_feature: Ceres CLONE ID no. 1579046
  misc_feature: Ceres CDNA ID no. 40041489
  CDS (496)..(2058): REFERENCED BY SEQ ID NO: 9978
aacccaaccttttttcactgctccaccgaaggcacagccgccgccgtttcttcatctcccatcttcgtcgtcttcgcagcaccggcgctccattttccgctctcggcacgcaggcgacggcggcggcgctcaggcttgggatcttaacgacggagtcagcggtttcccctccccctctcgccagccgcctcgcgccttcgcctccggtcctccgcacaccggctggtgaccctgcgtgcgtgcctctctctctcctcccgccttcggtggatcgtcaacgccgccaggccccggcatctgagccgcgcgcggcctgagggcagcgagagccagcagatgctgctccaccaaggtggtcgcgcatgcccaaagcgaagcgttacccgtcctcttagcgctgaagcgtgcgcttagtgccggcttttggaaccctgtatcataccgaattgcgcattatagaaattggctaggactaccctgggtttgccgttggccatgacgtgtgctgcttacagtatcagaggtcctctcatgcttgctgcaaggcgcagctcggatgtgttcgctagtagcaagtcgtgcaatggcaagtcttcggtgtcttaccccgttattcagtggtggagcagcaactgctcatccttcacaatgcggcatgtcgcctcccatcatcacttgattgttaaggcttcagcaacgtggcactcaaaagcttcagcaactgatgcagccactgcttccgatgagaggataactgtactggtcattggtggtggaggcagggagcatgctctttgttatgccttgaaccgttccccatcatgtgctgcagttctatgtgcccctggtaatgctggtattgctcagtccggggatgcaacatgtatttcagatttggacatctccagtagcgatgatgttatctcgttctgccgcaagagggaagtgggaatggttgtagtgggtcctgaagcccctcttgtcgcgggtcttgtgaatgaccttgtcaaagttgggataccaacctttggcccttcatcagaggctgcagcattagaaggatcaaaggacttcatgaagaagttgtgtgataagtacaacatccctacagccaagtatcgcacattcacggacgctgtggaagctaaaaaatatgttaaaaatgaaggagcccctatcgttgttaaagctgatggactggctgctggaaagggtgtggttgtcgcaatgactttggatgaggcgttcgaagccatagattctatgttggttgaaggctcattcggttctgctggttcactggttatcatcgaagaatttctagagggtgaagaagcctctttctttgcattggtagatggcacaaatgctttacctcttgaatcagcacaggatcacaaaagagttggtgatggtgatgttggcccaaataccggtggtatgggtgcatactcccctgctccaatagtgacagatgagctcaaacgcactgtaatggaaagtataattatccctactgttaaaggaatgtcaaccgaaggttgcaagtttgttggtgtattatatgctgggcttatgatcgagaagaagtctgggctgcctaagcttattgagtacaatgtaagatttggtgacccagaatgccaggttctgatgatgcgattagaatctgatttggcacaagttctgttatctgcttgccagggaaagttaggcaatgtttcactaacctggtcacccgaaatggcaatggtggttgtgatggcaagccagggatacccgggcccttataaaaaggggaccgtgataaaaaacgtggacaaggctgagcaggtgtctccggctgtcaagatattccatgctgggacagcactagatggagacggcaacctcgttgccgttggagggcgagttcttggtgtcactgccaagggcaaggacattgaagaagcaagggcaagagcgtatggtgcggtagacgctgtcgagtggccagaagggttcttcaggcacgacattggttggagagcactgaggcagaagcaagcggcaaaatagctgctaaccatgaccgcgagattttcctagactaccacaactacggtgagcttgtagtgtttgcaagtaataaaaagggaaacggtgtaacgttcactgttttttttggttgtggaacagcaggttgttcaaattttaacacctgcggatttcagcatgatttggtagatgtttgaaccgagattatgttcagagtctagacaagcgctagcgtgaaagctgcgccatctgaattctgaccatttgtctttcagttctcggataagtggacctcctatatgattgtgatatctcaaaccaaacacttcagagtgtgatcgacctgtcctgtcccgtccggttaaaaaaaaaaaaaaaaaaaaaaaagaaaaaaaaaaaaaaaaa

SEQ ID NO: 9978 - protein, 520 aa, Zea mays
  misc_feature: Ceres CLONE ID no. 1579046
  misc_feature: Ceres CDNA ID no. 40041489
  misc_feature (190)..(272): Pfam Name: GARS_B PFAM Desc: Phosphoribosylglycinamide synthetase
  misc_feature (273)..(413): Pfam Name: GARS_A PFAM Desc: Phosphoribosylglycinamide synthetase
  misc_feature (417)..(513): Pfam Name: GARS_C PFAM Desc: Phosphoribosylglycinamide synthetase
  misc_feature (86)..(188): Pfam Name: GARS_N PFAM Desc: Phosphoribosylglycinamide synthetase
  misc_feature: Homolog of GI Number: 37992755 NR Desc: glycinamide ribonucleotide synthetase
  misc_feature: Homolog of GI Number: 77553855 NR Desc: phosphoribosylamine
  misc_feature: Homolog of GI Number: 1071918 NR Desc: phosphoribosylamine
  misc_feature: Homolog of GI Number: 50941893 NR Desc: putative glycinamide ribonucleotide synthetase
  misc_feature: Homolog of GI Number: 20259251 NR Desc: putative phosphoribosylglycinamide synthetase
  misc_feature: Homolog of GI Number: 23015506 NR Desc: COG0151: Phosphoribosylamine
  misc_feature: Homolog of GI Number: 77740138 NR Desc: Phosphoribosylglycinamide synthetase
  misc_feature: Homolog of GI Number: 75676736 NR Desc: phosphoribosylglycinamide synthetase
  misc_feature: Homolog of GI Number: 1321820 NR Desc: phosphoribosylamine
  misc_feature: Homolog of GI Number: 15964611 NR Desc: PROBABLE PHOSPHORIBOSYLAMINE
MTCAAYSIRGPLMLAARRSSDVFASSKSCNGKSSVSYPVIQWWSSNCSSFTMRHVASHHHLIVKASATWHSKASATDAATASDERITVLVIGGGGREHALCYALNRSPSCAAVLCAPGNAGIAQSGDATCISDLDISSSDDVISFCRKREVGMVVVGPEAPLVAGLVNDLVKVGIPTFGPSSEAAALEGSKDFMKKLCDKYNIPTAKYRTFTDAVEAKKYVKNEGAPIVVKADGLAAGKGVVVAMTLDEAFEAIDSMLVEGSFGSAGSLVIIEEFLEGEEASFFALVDGTNALPLESAQDHKRVGDGDVGPNTGGMGAYSPAPIVTDELKRTVMESIIIPTVKGMSTEGCKFVGVLYAGLMIEKKSGLPKLIEYNVRFGDPECQVLMMRLESDLAQVLLSACQGKLGNVSLTWSPEMAMVVVMASQGYPGPYKKGTVIKNVDKAEQVSPAVKIFHAGTALDGDGNLVAVGGRVLGVTAKGKDIEEARARAYGAVDAVEWPEGFFRHDIGWRALRQKQAAK

SEQ ID NO: 9979 - DNA, 2669 bp, Zea mays
  misc_feature: Ceres CLONE ID no. 1579825
  misc_feature: Ceres CDNA ID no. 40041490
  CDS (172)..(2424): REFERENCED BY SEQ ID NO: 9980
aatccatccggactttgttgatttcttctgttggtaatgaaacctaatctgctccgactctaagaggagtgagttccgagcaatcacaccgaaatcttccttcctcccctccattgatcccctcacaagtcacaagtgctttaccttcccgagtggtggcgtcttaatctgatgcacccacgcattgtggtgttcagctcaaaaatgaaaggagtgcttccgattaagggggcatcaggccgtgaaaagaaagcgcctaaggagctcgagagcgtattgaaccgatatttcgggtattcggggtttcgaggaaaacaactcgaagctatcgaagctgttctatcagggagagattgcttttgtttgatgcccactggtggtggaaagtccatgtgctatcagattccagctctggtgaaaacaggcattgttcttgtcatttcacccttgatagcactgatggagaaccaggttgccagcttgaaaaataaaggggttccagctgaatttctctcttcaacacaggcatctcacactaaacaaaggatacatgaagaccttgatactggtaatccttctttaaagttgctatatgtgactcctgagcttgttgcaacatcaagctttatggcaaagctaaagaagctctacaacagaggtcttcttggtcttgttgccattgatgaggctcactgtatttcaacttggggccacgatttcagacctagctaccgaaaactttcatcattgaggaagcagttcccagatatccctttgttagctttaactgcaactgctgtcccgaaggtccagaaagatgtggtatcatcattgtgcttgcaaaatccagtaattcttagagcttcatttaatcgacccaatatattctatgaagttcgttacaaggaccttcttgatgatgtttactctgatatatcaaatttgctgaaatcaagcgggaatgtttgctcaattatatattgccttgaacgggcagcttgtgatgatctaagcatgcatttgtcacagcagggtgtctcttgtgctgcttatcatgctggcctaaatagtaaagtgcgaagttctgttctcgatgactggctttcatcgagaactcaagttgttgttgcaactgtagcatttgggatgggtattgatagacaagatgttcgtattgtttgccacttcaacttgcctaagtcaatggaatccttctaccaggagtcaggtcgagctggtcgtgatcaacgaccttcaaggagtgttttgtattacggattagatgaccggaggagaatggaattcattttgagaaaccccaaaactaagaaatcacagccgtcttcctcttcaaatgagctttctgagaaggctctagctgacttcagtcagattattgactattgtgaaatttctagctgccggcggaaaaagatcattgagagctttggagagaaagtacaaccaactttatgccaacgctcatgtgatgcttgcaaacacccaaatttagtgttgtctcgtctggaggaactccgtcgtgtgcccaactgtcgctttaataagatctctccagtgtttcaaagctcagttaaacaagcacacttggacacagaattctggaatcgtgaagatgaggcaagcttatcagctgaagacatatctgattctgatgatgggaatgaggtagtgagtaatatagccatttcaaaggttccggcaaaagctggtctggatgcaaaatttaaagcactggagcgtgctgaaaatgcttattaccaaggcaaaggtcaggcgaagcagcagggtggcggcgttgctgacaagaaaagcatctctgaaacgctaagagatgcatgccgaaaaagattgttggatgctgttggacaagcaaagttgcgactcgggaatattccgtgcggagacgaggcttctgccacataccttgaaacagagtgcttcaaaaaatatgagaaggcgggcaagacattctactactcacagatagccgccacagttcggtggctgtcatctgcaacacccagtcagatgcgtgaccgcctcgacgctcttatcgaccgaaccaaagatgcgtcaggttgccccgacattgtcccagagtcacctccagcatcttctgaagtcgtcgtcggcgcaaggtcaggagaaaccagtaacgacaaaccgcagcatatttgtgagtcgaagagttcagaatatgagtctgcaaagggtgctgcagcatcgactgggaacatggtgctccccgccataccgacgttcagagaattcttgagccaaaaaggaagggatcgggcgaagtgctattcaaattctaatgcgacgaaccagccatctggtattcgtaggaaatttagtggtcacgttgataaggaagaagccagcaagaggatgaaatcatgaatatctgtcgggcaacttgattttttttcttctgccttttcgttgtcagtaatcaaacattgcaaatctacgttgtagtggagcattcctgaatcagaatctccatgatgattttcttattatatctagtttgtacagtgaaaaaaaaaaaaaaaaaaaaaaaaaaaaaaaaaaaaaaaaaaaaaaaaaaaaaaaaaaaaaaaaaaaaaaaaaaaaaaaaaaaaaaaaaaaaaaaaaaaaaaaaa

SEQ ID NO: 9980 - protein, 739 aa, Zea mays
  misc_feature: Ceres CLONE ID no. 1579825
  misc_feature: Ceres CDNA ID no. 40041490
  misc_feature (272)..(348): Pfam Name: Helicase_C PFAM Desc: Helicase conserved C
  misc_feature (34)..(206): Pfam Name: DEAD PFAM Desc: DEAD/DEAH box helicase
  misc_feature: Homolog of GI Number: 11121447 NR Desc: DNA Helicase
  misc_feature: Homolog of GI Number: 30690466 NR Desc: DNA helicase
  misc_feature: Homolog of GI Number: 50915286 NR Desc: DNA helicase RECQE
  misc_feature: Homolog of GI Number: 38230500 NR Desc: predicted protein
  misc_feature: Homolog of GI Number: 22654276 NR Desc: ATP
  misc_feature: Homolog of GI Number: 72085181 NR Desc:  similar to ATP
  misc_feature: Homolog of GI Number: 18485510 NR Desc: RecQ protein
  misc_feature: Homolog of GI Number: 62657360 NR Desc:  similar to RecQ helicase protein
  misc_feature: Homolog of GI Number: 73965025 NR Desc:  similar to ATP
  misc_feature: Homolog of GI Number: 42490810 NR Desc: Recql5 protein
MKGVLPIKGASGREKKAPKELESVLNRYFGYSGFRGKQLEAIEAVLSGRDCFCLMPTGGGKSMCYQIPALVKTGIVLVISPLIALMENQVASLKNKGVPAEFLSSTQASHTKQRIHEDLDTGNPSLKLLYVTPELVATSSFMAKLKKLYNRGLLGLVAIDEAHCISTWGHDFRPSYRKLSSLRKQFPDIPLLALTATAVPKVQKDVVSSLCLQNPVILRASFNRPNIFYEVRYKDLLDDVYSDISNLLKSSGNVCSIIYCLERAACDDLSMHLSQQGVSCAAYHAGLNSKVRSSVLDDWLSSRTQVVVATVAFGMGIDRQDVRIVCHFNLPKSMESFYQESGRAGRDQRPSRSVLYYGLDDRRRMEFILRNPKTKKSQPSSSSNELSEKALADFSQIIDYCEISSCRRKKIIESFGEKVQPTLCQRSCDACKHPNLVLSRLEELRRVPNCRFNKISPVFQSSVKQAHLDTEFWNREDEASLSAEDISDSDDGNEVVSNIAISKVPAKAGLDAKFKALERAENAYYQGKGQAKQQGGGVADKKSISETLRDACRKRLLDAVGQAKLRLGNIPCGDEASATYLETECFKKYEKAGKTFYYSQIAATVRWLSSATPSQMRDRLDALIDRTKDASGCPDIVPESPPASSEVVVGARSGETSNDKPQHICESKSSEYESAKGAAASTGNMVLPAIPTFREFLSQKGRDRAKCYSNSNATNQPSGIRRKFSGHVDKEEASKRMKS

SEQ ID NO: 9981 - DNA, 2429 bp, Zea mays
  misc_feature: Ceres CLONE ID no. 1581023
  misc_feature: Ceres CDNA ID no. 40041491
  CDS (90)..(2129): REFERENCED BY SEQ ID NO: 9982
aggcgatcccatattccccttccgatcccatcccttccgcatcgtccccgaacgacgcagacatctccccgtggcccgagggcccagacatgaaggccctgggcgcgcacgccgccgacctgctccgaggcccgcacctactccgcgccgccgtcttcgctttcgccgttgcgctcgccttcctcgttggctaccactggcccaacgcctccccgcgccttgtcttcttctcgtccgatgcctcctcgtcgtcgcccaggtcgtcctcccgctctccttccgtcgtgctctcccctaactctaacgtctccttcgacccatccctgatccctacccccagcaccccgcctgcttcttctactcccaatgcctggtccccgccctcactaccaccgccgacatcggcgccgccgcctcccctcccccctcctccaccaccagcgcgcctcggcatcgtcggcgaggacggcgctatgcaggacgacttcgacatcggcaacgtcggcgccaacgacactgatctggccaccgacgagaccgcgccgcaggagcctagcgacgtgggcgccagcggtggaccacctagggtgcggattgagaggttcccggtctgcccggagagcatgagggagtacataccctgcctcgacaacgaggatgatatcaagcggctgccctcgacggagcgcggggagcggtttgagcggcactgccctgccaaggacaagggtctcagctgcctcgtgccggcgcccaacgggtacaaggcgcccatcccctggcctcggagcagagacgaggtctggtttagcaacgtgcctcacacaagattgattgatgacaaaggaggacagaattggatcaccaaggtcaaagataaattcagatttcctggaggcggaactcaattcattcatggagcaaatcaatacctagaccagatctcccagatggtaccaaatgttgcatttggatctcatactagagttgtcctggatgttggctgtggagtagcaagttttggtgcatatttactttcacgtgatgtcctgacattgtccatagctccaaaagatgttcatgaaaatcagattcagtttgctcttgaacgtggtgtgcctgcaatggcagcagcatttgcaacgcgccggttgttatatccaagccaagcgtttgatataatacattgctcacgctgccgaataaattggacccgtgatgatggtatcctgctcctggaggttaatagattgcttagagctggaggctactttgcttgggcagcccaacctgtttataagcatgaagaggcccaacaagaggcatggaaagagatggagaacctcactgcccgactttgctgggagtttgtgaagaaagagggatacatcgctatgtggaggaaacccttaaataactcttgctacattaaccgaggtcctgaaggaaaacctccactttgtgatgctgatgataacccggatgatgtctggtatgttggtctgaaagcatgtattagtcggcttccagagaatggcgaagcaccaactcctgttcaatggcctgcacgcttaatggagccaccaaagaggcttcaaggcgtcgaaatggatgcctactcatcaaagaatgagcttttcaaagcagaaacaaaattttgggacgacataattgacggttatatccgtatctttaagtggaggaggttcaaagtccggaatgtaatggacatgagggctggatttggagggtttgcagctgctttgatccgccagaaactggattggtgggtgatgaatgttgttcctattagtgagccaaatacactacctgtaatttttgatcgggggcttcttggagtagctcatgactggtgtgaaccctttgatacataccctaggacgtacgatctacttcatgcatctggtcttttctcaaaggagcagaacaggtgtaatatctctagcatcttgctggagatggaccggatactcagaccaggtggtaaagcatatattcgtgaccggaaagaagttatacaggagatcaaagaaataacgaatgccatggggtggcgtggtactatacgtgacactgccgaagggcgtacgccagtaggaaggttttgatgtgcgacaagcctatggcgcgttaggcgatcaggtgaagacaagcaggggtaattttaggtacttttgcaactgaaaagagctgctgtcgggactgacatttgtgctgtagatagggtaggtcaaggactaatttgtaactatttgattgatcatccatttgtaaaatgatgatctgtgtagtttctgacatgtgccaatttcttttgttgaaacattgtcatggaaaccctacaaaagtgggggaaatacgaagagaccgttttaaactaaaaaaaaaagaaaaaaaaaaaaaaaaaa

SEQ ID NO: 9982 - protein, 679 aa, Zea mays
  misc_feature: Ceres CLONE ID no. 1581023
  misc_feature: Ceres CDNA ID no. 40041491
  misc_feature (181)..(672): Pfam Name: DUF248 PFAM Desc: Putative methyltransferase
  misc_feature (181)..(674): Pfam Name: DUF248 PFAM Desc: Putative methyltransferase
  misc_feature: Homolog of GI Number: 21928175 NR Desc: AT5g64030/MBM17_13
  misc_feature: Homolog of GI Number: 20334726 NR Desc: At1g77260/T14N5_19
  misc_feature: Homolog of GI Number: 58652086 NR Desc: At5g06050
  misc_feature: Homolog of GI Number: 50902216 NR Desc: ankyrin
  misc_feature: Homolog of GI Number: 56784487 NR Desc: ankyrin
  misc_feature: Homolog of GI Number: 34908262 NR Desc: ankyrin
  misc_feature: Homolog of GI Number: 77553823 NR Desc: methyltransferase
  misc_feature: Homolog of GI Number: 52077023 NR Desc: dehydration
  misc_feature: Homolog of GI Number: 7268141 NR Desc: ankyrin like protein
  misc_feature: Homolog of GI Number: 42573369 NR Desc: dehydration
  misc_feature: Useful for increasing seed/fruit yield or modifying fruit content
  misc_feature: Useful for sterility
MKALGAHAADLLRGPHLLRAAVFAFAVALAFLVGYHWPNASPRLVFFSSDASSSSPRSSSRSPSVVLSPNSNVSFDPSLIPTPSTPPASSTPNAWSPPSLPPPTSAPPPPLPPPPPPARLGIVGEDGAMQDDFDIGNVGANDTDLATDETAPQEPSDVGASGGPPRVRIERFPVCPESMREYIPCLDNEDDIKRLPSTERGERFERHCPAKDKGLSCLVPAPNGYKAPIPWPRSRDEVWFSNVPHTRLIDDKGGQNWITKVKDKFRFPGGGTQFIHGANQYLDQISQMVPNVAFGSHTRVVLDVGCGVASFGAYLLSRDVLTLSIAPKDVHENQIQFALERGVPAMAAAFATRRLLYPSQAFDIIHCSRCRINWTRDDGILLLEVNRLLRAGGYFAWAAQPVYKHEEAQQEAWKEMENLTARLCWEFVKKEGYIAMWRKPLNNSCYINRGPEGKPPLCDADDNPDDVWYVGLKACISRLPENGEAPTPVQWPARLMEPPKRLQGVEMDAYSSKNELFKAETKFWDDIIDGYIRIFKWRRFKVRNVMDMRAGFGGFAAALIRQKLDWWVMNVVPISEPNTLPVIFDRGLLGVAHDWCEPFDTYPRTYDLLHASGLFSKEQNRCNISSILLEMDRILRPGGKAYIRDRKEVIQEIKEITNAMGWRGTIRDTAEGRTPVGRF

SEQ ID NO: 9983 - DNA, 2011 bp, Zea mays
  misc_feature: Ceres CLONE ID no. 1581797
  misc_feature: Ceres CDNA ID no. 25403153
  CDS (336)..(1628): REFERENCED BY SEQ ID NO: 9984
acttctattccatcacccccagcgtgcgcgctgcactccctccctgcccctgctctctctctcgtggcgacggcgacggcgacgactgggcggccgttgctgccgccctactcgccaggcgcccaggtattcttcggccccttcgccggcgacgagtgtcaccaggttcctcgtctccggaacgcagtgcaaagcagatcgatctcggcccagcaggggcctcacgacttgactcccaagactccagggctggatcgtgtttcttccagtgtgcaagcttggatctcgtaggtctggtttagaaaggaccgtgcttgctctttgctgccgcaatcatgcagagtgggggcgacatgaggcctgtgcacaacagtgtcgatacagttaacgctgctgctgttgccatcgtcaccgcggagagccgcacacagcctcctgctgaacagagaaggaaatgggctgaccggttgagcgtgtacttctgctttggatcacagaagaatggccggcgcatgcgtgtcaaccatgccgcacttgtcccagaacctgcacctcaaaggacagatgcgcctgcagcagaaattccaaaccacccaccgcctcctgtgttcccctttgtggcaccgccatcctctcctgcttctttccttcaatcagaacccacatcaatcgtacaatcaccaagggctggagctccagctttttcgcccctctcaccaaattcccaatccccgacggggccaccatccatctttgctattgggccgtatgcacatgagacacaactcgtctcgcctccagtgttctcggccttcacaactgaaccatcaactgcccctttcactcctcctccggagtctgtccatctgacaaccccttcctctccagaggtcccatatgcaaagcttctgacatcgatcaacaatagcaagaatggtgaagcagggggtgatctccagtcgtatccaaactacccagacagcccaattgggcgcctgatatctccaagctcgggctgttctggcacatcctccccattccctgaccctgagatgcaggcttcttcacgcagcgctttacgcttgttcccagttcgtgagccccctaagatattggatggcgagggcgttgcgacacagaagttgatacctcgccatatgcgcaacggtgggtccctcttggatggccagatctcagcagctgtaccagttgtggacttctctgcccgacttcaacccaacgagcacgcaatggatcaccgggtgtcattcgagttgaccgtcgaagatgtcgcgcgctgccttgagaagaagactgcaatctccggggattctggcacggcatcattccaccttgcaccgaccggcagcggcgaccaccacagagaatccaacgaggcaagggcagggctctacgtcgacgaatcataccatgacttgcccgagaaagcgaggcggtccctgtccctgcgcctggccaaagagttcaatttcaacaacgtcgacgtcggtagcgtggagccgagcgtgggatccgactggtgggcgaacgagaaagtcgccgggatgacaactgagccaaaaaagaactggtctttccacccggtggtgcagcctggggtcagctaacctttgcactgaccataatgatcttatacagggatgaaggaattagcttcttctgcttctgcttctgcttcagtggtcgattccttagggatgacttgccagcttgttctaaacatgcagctagtggtaagttctggatttagatagtaataagtaatggggtgtccaccgtctaatatcgtcatgggatactaaaggtttttattctgggagatgtgacaaaccgcaaactctttggttaggggtcggtcggaactgtcctgttcgtctgttttatcctgataccggtgctgtgttgtgtatgtacataatgaagtagtttttttaaaaaaaagtcaattaaaagggtagaacagtttccttcgacaaaaaaaaaaaaaaaa

SEQ ID NO: 9984 - protein, 430 aa, Zea mays
  misc_feature: Ceres CLONE ID no. 1581797
  misc_feature: Ceres CDNA ID no. 25403153
  misc_feature: Homolog of GI Number: 51964548 NR Desc: PREDICTED P0474F11.28
  misc_feature: Homolog of GI Number: 34894046 NR Desc: P0436E04.7
  misc_feature: Homolog of GI Number: 12018147 NR Desc: vegetative cell wall protein gp1
MQSGGDMRPVHNSVDTVNAAAVAIVTAESRTQPPAEQRRKWADRLSVYFCFGSQKNGRRMRVNHAALVPEPAPQRTDAPAAEIPNHPPPPVFPFVAPPSSPASFLQSEPTSIVQSPRAGAPAFSPLSPNSQSPTGPPSIFAIGPYAHETQLVSPPVFSAFTTEPSTAPFTPPPESVHLTTPSSPEVPYAKLLTSINNSKNGEAGGDLQSYPNYPDSPIGRLISPSSGCSGTSSPFPDPEMQASSRSALRLFPVREPPKILDGEGVATQKLIPRHMRNGGSLLDGQISAAVPVVDFSARLQPNEHAMDHRVSFELTVEDVARCLEKKTAISGDSGTASFHLAPTGSGDHHRESNEARAGLYVDESYHDLPEKARRSLSLRLAKEFNFNNVDVGSVEPSVGSDWWANEKVAGMTTEPKKNWSFHPVVQPGVS

SEQ ID NO: 9985 - DNA, 623 bp, Zea mays
  misc_feature: Ceres CLONE ID no. 1581864
  misc_feature: Ceres CDNA ID no. 36706357
  CDS (186)..(395): REFERENCED BY SEQ ID NO: 9986
ctctccactcctctactttcccctgctccgccgctcgcctcctcctttctatatccgctccagaatccgctccagaatccactcccgagccttcccgagtagtactcatatgcagccgtgagatcagatcgaccgaccgaagaagaagaaggagaagcgaggggagatcagccagcgggcggaggatggcggactgggcaccggtggtggtgggggtggtgctcttcatcctgctctcgccggggctgctgttggagatgccggggtcgcaccgccacgtcgacttcggcggcctccacaccaacggcaaggccatcttcgtccacaccatcctcttcttcgccgccttcaccatcctcaccctcgccctccacatccacatctacgccggctagatacccatagcccacagattcatagatgcgccatgtaatctgctactagtactagctagctcttgctcagtcaatcgatcccctccatgtaatccgcttgtaatccctgcttgcttgccagatctctctgtactgccatcggttcaagaagaagcgtattgaactattgattgaggtgccgcgccatgcctgtttattcatttatttgatttaaaaaaaaaaaaaaaa

SEQ ID NO: 9986 - protein, 69 aa, Zea mays
  misc_feature: Ceres CLONE ID no. 1581864
  misc_feature: Ceres CDNA ID no. 36706357
  misc_feature: Homolog of GI Number: 50923847 NR Desc: OSJNBa0044M19.18
  misc_feature: Homolog of GI Number: 50923841 NR Desc: OSJNBa0044M19.15
  misc_feature: Homolog of GI Number: 1532167 NR Desc: localized according to blastn similarity to EST sequences
MADWAPVVVGVVLFILLSPGLLLEMPGSHRHVDFGGLHTNGKAIFVHTILFFAAFTILTLALHIHIYAG

SEQ ID NO: 9987 - DNA, 1929 bp, Zea mays
  misc_feature: Ceres CLONE ID no. 1582222
  misc_feature: Ceres CDNA ID no. 36691404
  CDS (304)..(1668): REFERENCED BY SEQ ID NO: 9988
aacccgttgtcgccttccctcgcctcccgcacgccagtccctgctgccctgccctcttccgccgcgtcgtcccctcctacgttcccctctccctcggtccgcctagatctcgccagggtttgccgcgtctcgtcttgatttttgctccggaaccagggctccatcggggcagagaggcaggaggggtaggccatcccggaaagtggcggatctgggtgttatcggaggaagagcatcgtgtagcgtttctgtcggtggcaggcatcgacgaggtgtgatttagaaggcatttgtgagtacggcatggactgcgtcggagctgtggacagcagcggaaccgatgatgatcttccacaatcatatcagaacagcagaggcatgaaaggcagtggacgcatcactggtaatggaagagatagtgttggtgcttctctgtatactagagttcaacctcagacagacatggaaacacaaatacatgagcttgagcaagaagcatattgttcagttcttagagcattcaaggctcaatctgatgctataacatgggaaaaagaaagtctcattactgagcttaggaaggagctacaagtatctgacaaggaacacagggagttgctaaacaaagttaatggcgatgatattattcgaagaataaggaaatggagagagtcaactggtgggcttatgattaatttggtgaataattctcagcgtacacatgaccctattcccagccctacgacatctgctcgcaagaggcaaaagatgtctcaacccattctctctgcatgtgtacctgcaccatctgctatgcattcacagcctttaactgcaccgatgcaaccatcatcttcaggagcaaaaaagggagctcaacccggcacaaaagtgaagaagaccaaaccaggccagaagatacctggtggctctgcagtcaaatctatgccatcttctgctggtcctggtgggcgaggaactattatcaataggaatatgtctgctggccttccacctgaaagttcacaattaaatccattaattggtcgtaaagtcatgactcggtggcctgacgataatagcttttatgaagctgaaataactgactatgatgcatcaaaggatatctatacactggtttatgacataaatacagcagacgagacatgggaatgggttgacttcaaggagatggcacctgaggatataagatgggatggcgaggagcctgatttaaaccttataggtcgtggtgctcccgtccatggtatgaagtcaagcagtcgtggtggccccatgtcaggtaccggaagagacagaggtccccaaaagaactcattcaagaaagattatccatcacaaaacggtattgggaagaagagtgttgactacatagaaattctccatacagagacactcataaaggaggtggagcgggttttcagttcagccaaccctgacccccttgagatggagagggctaagaaagcgctaaaggagcacgaacaatcattaattgatgcgattgcaaggcttgctgaggcgtctgatgatgatcgtgtgcgatctttggagtataaccgtggatggaggaaccaacatggaggaagatatgcggatgatatgaccatggacggccacatggctggagatgcagatgccatgtaaacctgccaatgtgtacacaaaattccttcattagcttattttttgcctgttgtaaaatcttgacgctaatttttctctctctagatttagccgtaggtacttctgattggtcctaaccaaagaaacagttaggatcaccactctgattgttcagcttttgtagtagaattacgcccagctcatcctttacactgtaaatttagatttggagctgattttgtcggtcgctagacatttgataaacaaaaaaaaaaaaaaaaa

SEQ ID NO: 9988 - protein, 454 aa, Zea mays
  misc_feature: Ceres CLONE ID no. 1582222
  misc_feature: Ceres CDNA ID no. 36691404
  misc_feature (54)..(127): Pfam Name: ENT PFAM Desc: ENT domain
  misc_feature: Homolog of GI Number: 50899376 NR Desc: emsy N terminus domain
  misc_feature: Homolog of GI Number: 42569914 NR Desc: emsy N terminus domain
  misc_feature: Homolog of GI Number: 30684221 NR Desc: emsy N terminus domain
MDCVGAVDSSGTDDDLPQSYQNSRGMKGSGRITGNGRDSVGASLYTRVQPQTDMETQIHELEQEAYCSVLRAFKAQSDAITWEKESLITELRKELQVSDKEHRELLNKVNGDDIIRRIRKWRESTGGLMINLVNNSQRTHDPIPSPTTSARKRQKMSQPILSACVPAPSAMHSQPLTAPMQPSSSGAKKGAQPGTKVKKTKPGQKIPGGSAVKSMPSSAGPGGRGTIINRNMSAGLPPESSQLNPLIGRKVMTRWPDDNSFYEAEITDYDASKDIYTLVYDINTADETWEWVDFKEMAPEDIRWDGEEPDLNLIGRGAPVHGMKSSSRGGPMSGTGRDRGPQKNSFKKDYPSQNGIGKKSVDYIEILHTETLIKEVERVFSSANPDPLEMERAKKALKEHEQSLIDAIARLAEASDDDRVRSLEYNRGWRNQHGGRYADDMTMDGHMAGDADAM

SEQ ID NO: 9989 - DNA, 1953 bp, Zea mays
  misc_feature: Ceres CLONE ID no. 1582602
  misc_feature: Ceres CDNA ID no. 40041492
  CDS (183)..(1481): REFERENCED BY SEQ ID NO: 9990
agcctgccagcggcctgcctgcctgcctactagtgcggcgtggaggtggagcagtgggcgctacagcctccatcagctagctgccttgccgtgtcctcctcttcctcctgtcggtggcgatctctgcggaaacccgagcttcgtccaagccgggcagtagtgcgcgccgcctgggcgtaattatggattcttttgagggctctgatcatataactcaaagaaaggttggtcctgcaaaacatattgcattggttgatggaaagaatgagcctgcaggagaagggttgcctgatggttggctgaaagaatgcagacctagaaagaaccgaaatggatctagagccaagagtgacacgttctatattgatccaatcaatggatacgaatttcactctctcaaggatgtacaccgctatcttgaatctggagacatcagtaaatgtattagatcgccaaacaagagaaaaattggggacctgcatactaaagaggaccaatctcatcatacaggaaaactatcagatcatacccagctggatactgctgatgagtctaatcgatatgatctaccggaaggtaccaatgcactgggatatgctctgctaaatccagaaagcggagagaatgctgaaaatactgcactgtccaagcctgacaatataagctcaatccaaattgaagctggtcaggttgaagctacagaagataagagcatccaatcaggctctatagaatacactccaggggaagctaaatctgtcactaggaaaggaacagatgtgaaggagaaaccgaaggggaaaagatacaaaactaaacctgccaaggggattgctatacctcttagatcgtcacctcgtttagttgcactgaagattagccaggaagcaaataatgcaaccagagatggacatattggcacacagacagacaccattaacgagccagaaccaaagcaagtccaaaaacccaggcgaaagacgaattcttctgtaattcctgagaggaaagatggggaacctaccaggagttgtgcagaagcccttccttcacttcccaatcagatacagggagcatcattcccacactcttcaggagatgctggatgccagaatgcaccagccgaggcacctgttctgcgacaacaagcaggagcaggacaaggcgagacatctgatggtttgcctggatctgccctgacgtcgctgtttcaacatgtctggtcagacccgtgccttgtgttcgcgttcaggactctcctgggtgatatccctgttcttgatgacgttcgagcatatcggtcttcggcttatgatggtaacagagaccactaccttccaccacagaacatgaataaaaacgctgcagccaactggtccgctctggcttatgatggtaacagaaaccacgcgcaagtcgaccatgttatgccgaggccatcagatacgttctacatcagtggttggttccctccccagtgaattcaatctaggaaataagaaagcaatttcttacctggcaaggacaaatcagaagcaagctcaagtcctagtcctagtcttggctcccttttggcccttgcctcaacaaggatgcatgttgcaagcaagactgcagctcgttgtaattgtgtggaggatccataactagagatgtcaatggggacccgatacccgataacccgtggggaattcctctattagggtacgggtatgggacaaaaattatccccatgggtatggatatgggacaaaatctctacccattgggtaaacgggtatgggtttgggaagcaataatccgaacccgattacccatgggtatttcatacgtgtacacctgtcctgtttgtatgaatgagttgaggccgagttggccatcaaacccggcagactccatttcttatattggtcccaagtaaaaaaaaaaaaaaaagaaaaaaaaaaaaaaaaa

SEQ ID NO: 9990 - protein, 432 aa, Zea mays
  misc_feature: Ceres CLONE ID no. 1582602
  misc_feature: Ceres CDNA ID no. 40041492
  misc_feature (25)..(101): Pfam Name: MBD PFAM Desc: Methyl
  misc_feature: Homolog of GI Number: 50928693 NR Desc: OSJNBa0070C17.22
MDSFEGSDHITQRKVGPAKHIALVDGKNEPAGEGLPDGWLKECRPRKNRNGSRAKSDTFYIDPINGYEFHSLKDVHRYLESGDISKCIRSPNKRKIGDLHTKEDQSHHTGKLSDHTQLDTADESNRYDLPEGTNALGYALLNPESGENAENTALSKPDNISSIQIEAGQVEATEDKSIQSGSIEYTPGEAKSVTRKGTDVKEKPKGKRYKTKPAKGIAIPLRSSPRLVALKISQEANNATRDGHIGTQTDTINEPEPKQVQKPRRKTNSSVIPERKDGEPTRSCAEALPSLPNQIQGASFPHSSGDAGCQNAPAEAPVLRQQAGAGQGETSDGLPGSALTSLFQHVWSDPCLVFAFRTLLGDIPVLDDVRAYRSSAYDGNRDHYLPPQNMNKNAAANWSALAYDGNRNHAQVDHVMPRPSDTFYISGWFPPQ

SEQ ID NO: 9991 - DNA, 2633 bp, Zea mays
  misc_feature: Ceres CLONE ID no. 1582685
  misc_feature: Ceres CDNA ID no. 25892283
  CDS (134)..(2425): REFERENCED BY SEQ ID NO: 9992
aacctcctccactccgccacctgctgcttcccacgcctccttctccccccgtctctaggttcgttcgttccacgttgacggccaccccgcccacagccgcgacaaactcttcctcagacccacgccacgtacgatgcctctctccccttcccctccgcccaacgccgccgccgccgccgccctacccctcctcctgctgctcgtctgcgccagcagcattgccgcgcagccgctggcgtcgtcgcaggccaaggcgctcctccgggtgcgccgcctgctgttctacccgccggcgctcgagccgctgcgcggggcgccggacccctgcgcgctgccgcccgcgccggccctcgcagtcgcctgcgagggcggccaggtcacggcgctctccgtcctgggagaccgcgacccggacgcggcctggcgcgccgcgctgccggccagcttctcctccgaggcgctgttcaccacgctcaccaggctcccggcgctcgcgcgcctctcgctcgtcggcctcggcgcctggggcccgctcccgggcgccaaactccgccggctccaggcgctgcagcagctcaacctcagctccaactacttctacggcgccgtccccgatggcctcgcccggctctactcgctgcagagcctcgtgctgtcctggaactggctcaacggcaccgtgccgtccctgtccgggctccagttcctggaggagctcgacctgtcgcacaaccggctcggcccggcgttcccggacgtggggaggtcggtcgcgcggctggtcctggacgacaacaacttcaccgggggtatcccggcgggggtgagctcgctgggcctgctccagtacttcgacgtgtccgggaaccagctgcagggttggatcccctcctccgtcttcgcgctcccggcgctgcggtacatcaacctctcccgcaaccggctggcgggccagcttcccgccaccacggcttgcgcggaggcgctggcgttcgtggacgtctcggcgaacctgctcactggggcgcgcccgccgtgcatgcggggcaactcctcggcgcgcacggtcctcgtcgcgggcaactgcttcgccgacgccaagcagcagcgggccagctcgtactgcaaccccggcgcgctggccgccgtgctgccgccgccgcagggcaacggaggaggaggagggcaggggacggggaagggccgcgagatcgggatggttcttgcgattgccggcagcgtcgttggtgccgcattgctgattgcgctggccatggtggtggtcctgaggagggcgaggaggcagcgtccggaggcgaccatcctgccgaagtcgcccgcggcgacaccgaccaacaaggcggatggatggaaggctccggctaaggcaacccagaagattattactccttctgataagagacatgcatcacaagctgcaagggtgaatacactggaagtaccagcctaccgagtgtgtacactggaggagctccaagaagcaaccgacaatttcagttcctccaacctaatcaagactagtcctcttgcacaggattataatggtcagcttcaagatggttcacgagtactggttagatgtttgaggctgaagccgaagtactcctcccagagccttgtccaatacatggagattatttctaaacttcggcaccgtcatttggtcagcatcattggtcattgcattgtcagtgatgaggagaatcctaataatgcgagctcagtctaccttgtttctgaatgcgtgacaaatggatctttaagaagtcaccttactgagtggaggaagcgtgaaatgctcaagtggccccaacgggtttgcgctgccattggcattgcgagaggggttcagtttctgcataatctgactgctcctgggttcgtacagaacaatctcaacatagaacatattctgctggacaagaccctcacgtctaagatcagcaacttcagtcttccaatgatatcaactagcaagaacggcaagattctctcagagaccccatttgctgtccatgaagacaatgatatcggcagtgctcagaacgcggcacaaggtgacaaggaagacatctaccagattggcctaattctcctggaggtgatcacaggcaaaccaacagagtcccaaagccaactggagtccctgaaagctcagctaagtgaggcgctgactgaagacccagacaggctgaaagacatggcagacccggcgatacacggtacttttgcagtggactcactgagcacagtcgccgagatagccctcaagtgcacggctggcgacccaagcgaccgaccttccatcgacgacgtgctctggaacctgcagtactccatgcaggtgcaggatgggtgggcgagcagcgagagcttaggcttgagcgtcaaatctcaggtttagataaaggcgcagtgattcggttcctatgcaaatgatgattatgaagctctatgcgccatcactctgcctctagttttctggggttttttttttgggaggagaggtcgttggtatagtctctactgtatatacgtggaccttacctttttcagaactgttgtttatggtacctgtaaaactcaggttctattaaaaaaaaaaaaaaaaa

SEQ ID NO: 9992 - protein, 763 aa, Zea mays
  misc_feature: Ceres CLONE ID no. 1582685
  misc_feature: Ceres CDNA ID no. 25892283
  misc_feature (168)..(190): Pfam Name: LRR_1 PFAM Desc: Leucine Rich Repeat
  misc_feature (507)..(584): Pfam Name: Pkinase PFAM Desc: Protein kinase domain
  misc_feature (714)..(739): Pfam Name: Pkinase_Tyr PFAM Desc: Protein tyrosine kinase
  misc_feature: Homolog of GI Number: 7262681 NR Desc: Contains similarity to a Receptor
  misc_feature: Homolog of GI Number: 15223744 NR Desc: leucine
  misc_feature: Homolog of GI Number: 50725434 NR Desc: putative receptor
  misc_feature: Homolog of GI Number: 2947063 NR Desc: putative receptor
  misc_feature: Homolog of GI Number: 30678025 NR Desc: leucine
  misc_feature: Homolog of GI Number: 33242911 NR Desc: transmembrane protein kinase
  misc_feature: Homolog of GI Number: 34900026 NR Desc: putative brassinosteroid LRR receptor kinase prrotein
  misc_feature: Homolog of GI Number: 50919095 NR Desc: putative receptor
  misc_feature: Homolog of GI Number: 4522003 NR Desc: putative receptor
MPLSPSPPPNAAAAAALPLLLLLVCASSIAAQPLASSQAKALLRVRRLLFYPPALEPLRGAPDPCALPPAPALAVACEGGQVTALSVLGDRDPDAAWRAALPASFSSEALFTTLTRLPALARLSLVGLGAWGPLPGAKLRRLQALQQLNLSSNYFYGAVPDGLARLYSLQSLVLSWNWLNGTVPSLSGLQFLEELDLSHNRLGPAFPDVGRSVARLVLDDNNFTGGIPAGVSSLGLLQYFDVSGNQLQGWIPSSVFALPALRYINLSRNRLAGQLPATTACAEALAFVDVSANLLTGARPPCMRGNSSARTVLVAGNCFADAKQQRASSYCNPGALAAVLPPPQGNGGGGGQGTGKGREIGMVLAIAGSVVGAALLIALAMVVVLRRARRQRPEATILPKSPAATPTNKADGWKAPAKATQKIITPSDKRHASQAARVNTLEVPAYRVCTLEELQEATDNFSSSNLIKTSPLAQDYNGQLQDGSRVLVRCLRLKPKYSSQSLVQYMEIISKLRHRHLVSIIGHCIVSDEENPNNASSVYLVSECVTNGSLRSHLTEWRKREMLKWPQRVCAAIGIARGVQFLHNLTAPGFVQNNLNIEHILLDKTLTSKISNFSLPMISTSKNGKILSETPFAVHEDNDIGSAQNAAQGDKEDIYQIGLILLEVITGKPTESQSQLESLKAQLSEALTEDPDRLKDMADPAIHGTFAVDSLSTVAEIALKCTAGDPSDRPSIDDVLWNLQYSMQVQDGWASSESLGLSVKSQV

SEQ ID NO: 9993 - DNA, 2227 bp, Zea mays
  misc_feature: Ceres CLONE ID no. 1583232
  misc_feature: Ceres CDNA ID no. 40041493
  CDS (2)..(2023): REFERENCED BY SEQ ID NO: 9994
agacgccgacgcggacgcggtcacgcctttttttttcagccggctggttcacgtgctcgacgacggcgagcgtctgtctaggagcaagatggaagggaacaggatagctcggttttcggtcacctggaggggcagccaacttgatgtggatgcggatccaagttgtaccgtcaaagagtttgggcaactgttgcaggacttgactagtgttaagccagagacgttgaagctcattgttccacaatctacaaacaaaggctccaagctgatcatgccattttcggatgcacattcgagattgacactgaatggagtgggtattagcgagggaaaacctatccgaatgatgggagtttatgatgatgaaatcgaggaggtatccgacaatggcaaaagacctgaccaacgcattattggatttgatgaagaagaacagcggcttaggcaaagatcattaggcaggccacagatttcactcaaacttccccagggacaatacatcttctgcgattttcagacgcttcacttacctgggattgagctgaatcctccaccttcggaagctctgaaacgaatgcacatgcttgcatgcgaccctggtgtaattgcgatcatgaaaaagcataaatggagagtcggaatcatgactgagatggctcctgttggatatgtaggcatcagtccaaaatgtattttaggtttcaataagaacatgggagaggagatatctcttcgcctgcgaactgatgatttgaagggattcaggaagtatgaaagtatcaagaaaactctacttcatgagcttgcacatatggtgcactctgaacatgatgcaaacttttttgcccttaataagcagttgaacgaggaagctgcttccatggactggaccaagtctacaggtcatatgttgagtggtcgtaaaatcttcgattcatatgaagaggaatttgttctagaaccagagataactgttgctggtcacaggctcgggggagagtcaagttcgcttgctagcgcccgtgcattgtctggagctgctgcttaccagcgttttctgaatgcatctgcaaatgtggatcatgcttcaggcactaaaattgaatatagttctgatgatgttcctcgaggttttgttcatgaaactgtgaaggtagagccagatccagattatgctatgcatgtggattcagcagctgggctatcatttgcagggcagcatactattggttactctgatcctaatcctgacgatgttggcaagcaaagttttgatagatgcctagagcctgatcctgatgattcctcaaatgctaataatctgaaccaggagctgaggtttgatgtaagacaccatagtgaacctgatcctgatgatggtagtaatgaagttccggaacatggaaacacgatggaaatggatagtgaactgacaaaccacatcacagttgtgaagtatgaacttgaccttgctgattcctcaaatgctaaccaggagttgatcattgacgggaagcatggtgaagaacctgatcctgataatacttgtcaagatgttttaaaatctggtaatgggacagaaatgataacagaacagagtggaaattccatggttctgaaagctgaacctgatcctgacgactcaaacatcaatgagctgcaaagggttgaagaaccagtgagagccctctgttcacgactccagaagtccattaagatgcttcggttgcaagcaacacctgtagaggcagagtctgctattcaaactctctttaagattatcaagaatgttatagagcatccaaatgacattaagtataagagattgcgtaagtccaatccacatttccaaaggagcgtagcaaactataaagctgcaatggaggttcttgaattgattggtttctgtgaggatgtaatctcagatgaggttgggcgtgctgagacttacctggtattgaaaaggaatgatcctggattgctatggctggcaaagtcatcccttgaggtctctctggcttgataaaatttgatacatcattcatggttgctatttttcgtcgtgaatatatttgattgtttgtacaagagagctagctattggcatacaccattctcctgtatggggactgttgtatacttgcatatgaatacacaagaatgtaattcatggttgctatttttcgtcgtgaatatatttgattgtttgtaaaaaaaaaaaaaaaaa

SEQ ID NO: 9994 - protein, 644 aa, Zea mays
  misc_feature: Ceres CLONE ID no. 1583232
  misc_feature: Ceres CDNA ID no. 40041493
  misc_feature: Homolog of GI Number: 50947329 NR Desc: zinc metalloproteinase
  misc_feature: Homolog of GI Number: 19075821 NR Desc: putative Zn
MEGNRIARFSVTWRGSQLDVDADPSCTVKEFGQLLQDLTSVKPETLKLIVPQSTNKGSKLIMPFSDAHSRLTLNGVGISEGKPIRMMGVYDDEIEEVSDNGKRPDQRIIGFDEEEQRLRQRSLGRPQISLKLPQGQYIFCDFQTLHLPGIELNPPPSEALKRMHMLACDPGVIAIMKKHKWRVGIMTEMAPVGYVGISPKCILGFNKNMGEEISLRLRTDDLKGFRKYESIKKTLLHELAHMVHSEHDANFFALNKQLNEEAASMDWTKSTGHMLSGRKIFDSYEEEFVLEPEITVAGHRLGGESSSLASARALSGAAAYQRFLNASANVDHASGTKIEYSSDDVPRGFVHETVKVEPDPDYAMHVDSAAGLSFAGQHTIGYSDPNPDDVGKQSFDRCLEPDPDDSSNANNLNQELRFDVRHHSEPDPDDGSNEVPEHGNTMEMDSELTNHITVVKYELDLADSSNANQELIIDGKHGEEPDPDNTCQDVLKSGNGTEMITEQSGNSMVLKAEPDPDDSNINELQRVEEPVRALCSRLQKSIKMLRLQATPVEAESAIQTLFKIIKNVIEHPNDIKYKRLRKSNPHFQRSVANYKAAMEVLELIGFCEDVISDEVGRAETYLVLKRNDPGLLWLAKSSLEVSLA

SEQ ID NO: 9995 - DNA, 1946 bp, Zea mays
  misc_feature: Ceres CLONE ID no. 1584249
  misc_feature: Ceres CDNA ID no. 40041494
  CDS (447)..(1613): REFERENCED BY SEQ ID NO: 9996
accggccgttccgttttgccgaagctagaaggtagctctcctggtgagtgcgagtctccgtcgccccccaaagcccaagccaacccatcgccgcaatgtccaacacgacggtcgacgggtccgacagcgacgccgacgccctgcgctccgcgtccgccgttccaggcgaacgaacctctaggtgacgcgtttgccgtcgaccgacgtcgccggcggtatggacggccatggccttgtgtgcatggacgataaagcccatatggccacatccatgcatggactccacggctccaccccaggcgccgacgagcaccccgctccgtgcgaagctccaccttcgcacgttcgatttccccttggtttgctgtgttgttttgagcgtacacatatctaacagggaaccactttgaaacttgaatatattggcgttgctatagtggagtaacatggccttctgcactatgtataccattcatctgtccgtcatagttttgttggcagtcacctacatgcatgtaccagttactgctatcatcgttgttccaacctctaattgttatacatttgataatgaaagccgtcttgttgattttacacatctgattggaaatgttttcgaatataaggaacagggctcacctcgctctgatttgattgtcgaattctgcaaagatgtgcagaaaagatctcaagagggttaccttgaatttggacgctttgttagtcctcactcttttctaactggttcaggtcctattgactatattcagaaaatgcataatggagatttagtgcactgtgaaactacattccacaagatgggtcgtacagcacaggtaaacatcatatgtggacattgctcgaacaaagtgtgcaaagatgaacaaggatgcatttgcaacatatcttaccatgaacgaatgtgcagggtgattgtcgaactagctattcgttgtgttaaaagtggtcccagagtatttaaaggtttcacggtgggcttccatccccgctcatcagaaattgtttataatggattcactcagcctggatttgaacaacctcaccatggatttagcttccagactgagcagattcatgtgtctctttaccttagcgccaagtcctcactctcaggccttgttgggaaaccgaccttcaaggttaatccagtgaaagggcttggtgttacacttgcaggatcaggattcaatgatgccatgcctagtaccctgtctcctacagttttgaatgtggattggagatgtgaaattgttcgaaccagtccttatgaggtccatatttttatccctgtggagggctatgacccaattgaatttacactaacgaaaaaatgtggttacagacaagaaaaagagagtgatcccatgaaaggctgggcaaaatttggaattgtttcttgcgtgttcattgtcttatcatgcatactttgttgtggagggttcatctacaaaactcgcacattgcatttgtacggtttagatgcgctgcctggtattgccgtcttgtctgccctattggatgctgttgggagaccaagaggctacttgcctgcagttaatcctaatgaaaaccatgcaagccatgcatcttgagagcacgtggttggtaccacacaagtaggaagtagcacaatggataaatcatagggcatatgggccaatgtgaactaatgggtatattctgaggactgtttcctgtatgttttcattctatattcaattaatctagtctctactttatcagacataattcgttgacacatccagcatcagcctacccaagaaattttccctctgctacaagcaagtgagcttatggagcgttgctaattatcgcactattagtgtagcttttatgcacaagttctttacatgttcaaaaatgaaaagcatatacaccatcctttgcaaaaaaaaaaaaaaaaa

SEQ ID NO: 9996 - protein, 388 aa, Zea mays
  misc_feature: Ceres CLONE ID no. 1584249
  misc_feature: Ceres CDNA ID no. 40041494
MAFCTMYTIHLSVIVLLAVTYMHVPVTAIIVVPTSNCYTFDNESRLVDFTHLIGNVFEYKEQGSPRSDLIVEFCKDVQKRSQEGYLEFGRFVSPHSFLTGSGPIDYIQKMHNGDLVHCETTFHKMGRTAQVNIICGHCSNKVCKDEQGCICNISYHERMCRVIVELAIRCVKSGPRVFKGFTVGFHPRSSEIVYNGFTQPGFEQPHHGFSFQTEQIHVSLYLSAKSSLSGLVGKPTFKVNPVKGLGVTLAGSGFNDAMPSTLSPTVLNVDWRCEIVRTSPYEVHIFIPVEGYDPIEFTLTKKCGYRQEKESDPMKGWAKFGIVSCVFIVLSCILCCGGFIYKTRTLHLYGLDALPGIAVLSALLDAVGRPRGYLPAVNPNENHASHAS

SEQ ID NO: 9997 - DNA, 2505 bp, Zea mays
  misc_feature: Ceres CLONE ID no. 1584648
  misc_feature: Ceres CDNA ID no. 40041495
  CDS (402)..(2219): REFERENCED BY SEQ ID NO: 9998
aacaatgggccacgccgcaccactgagcacccttcctccctgctcttgcctctgtcctatactactactactacccatctttagccgccgcgtgcatgcaagaagagaaatagccgccgatcgatcagcgctcgaccgacccgtcatccttgacgaacgaccagctaggaaacaggaggcaccttctttgcacgtgtcagtgccagccaggcgaacccaagggctagctgtcaggacggctcagctccagctttgcggccctccagctctccccagttcaagttcaatattggcgagcatgcgagtttgccctcttccgtcatcgtcctcgcgatccccgcgtccctgtttcggcgtacgcctcccgtagacaacagttgcgccctgctctccggcaagctatggccaagctgagctgcttccccgctctgctccccggcaagaggaagaagaagacacgcaagatcaccgatgccatcaaggccagcggcaacgagtgccccaaggtgaagccggtcgaagtcgaactcatcgacccgacgcttggtgcaggcgtcgtccaggacgtcgtccccgccgagctctcggtccccgtggaggaccgcgacaataaggaagcggctgatcaactggtgtcggtgaaggagagcgatctgtcagatttcgacttcagcttccacgcggccaagaagcccgtccggtccgacagtggcgtggcactggacacctcggccgacgctgcggtggcggacacatcgccgaagctgaagcggtcttgctccaacatcgagactaagcgaccaggctcgcgttccgcgcccgagatgccggcccggtcgcggtcctacggcgatctgggcaacctggtcgccggcctcgccctggacgcgacggcgaccccgcacggcgcgccggaggccagtccggcgtccgtgaagacgtcgcgcaccgccgaccgcgtgatgctgaagaagcggtcgtccagccaggtgctgccctcgcgcagccggaagctctggtggcggctcttcctctggagccaccgcaacctgcacatgccgcggtcggcgcgcacggcccaccgatcgttctcgcctggccgccacgacgggtacacctcggacacgttcgaggagggcccggccgccgaccgcaagaacaagacggtcatggtcgacgagtcgccgccagcagcgtctgtgcccaaccagtgggtcgccttctgcgccgagagctccatccacgaccgcgtcagcgcgtgggtcagcagcatcgaaagcgagcctccgttcgatatcgccgaggaggatgacgacaactacgacggagaggacgatgaggagaatggcgagtgtgcggcgtcgcagccgcgccatctcgagctcggggagccatcgtccgggaagggcggaaacagcaaatccaagcgctgcgcaacgacggccgacgaggtcgtccaggccaacaccgtggtgcagtccctgaacgccttctcgtcggtggcgcacatctcagggatgggcctcaaggtggtgccgatgatcgcgcccttctcaaccctccgggccgtcaacctctccagcaacctcatcgttcatatctcccctggatcgctgcccaagggcctccactctcttgatctgtccaggaacaagattgccagcgtcgagggcctccgggagctcacaaagctacgcgtgctcaacctcagctacaacaggatttcgcggattgggcatggtctgtcgaactgcacggccatccgggagctgtacctggcgggcaacaagatcagcgacgtggagggtctgcaccggctgctgaagctggcggtgctggacctgagcttcaacaagattacgacggccaaggcgctggggcagctggtggccaactaccactccctcctggcgctcaacctcgtaggcaacccggtgcaggccaacatcggcgacgacgccctgcgccgggcggtcacgggcctcctcccgagccttgcctacctcaacaagcagcccgtgaagccgcagcgcatcgcgcgggaggtggccacggacagcatcgcgcgcgccgcgctcagcggctcggacagccggagcatccggaagaggacgtcgcggcggctcacgcagagcccccgctcgtcgtcgttgaccagggcccgtggcggcggcggcggcggttcacccacaccaagaaacacctctcgtcgtcgttgaccagaagaaccaactgcgtgattcgcgttgctctttggagacgggagacggcggcgtgactgcgtgcaggcagactcagacgacaccatgattcggcacggcgccagcatgatatgagacaaaccaagtatataaagcaagtatgatgtgagagaattgcgatgcaacacataatgtacatacttgttagggagatattgcttagattaatactacgaccgatgcatctttgtacctgaaaaaaaaaaaaaaaaaaaaaaaaaaaaaataaaaaaaaaaaaaaaaa

SEQ ID NO: 9998 - protein, 605 aa, Zea mays
  misc_feature: Ceres CLONE ID no. 1584648
  misc_feature: Ceres CDNA ID no. 40041495
  misc_feature (430)..(452): Pfam Name: LRR_1 PFAM Desc: Leucine Rich Repeat
  misc_feature: Homolog of GI Number: 79384765 NR Desc: protein binding
  misc_feature: Homolog of GI Number: 8052541 NR Desc: F3F9.22
  misc_feature: Homolog of GI Number: 50933705 NR Desc: protein phosphatase regulatory subunit
  misc_feature: Homolog of GI Number: 56283929 NR Desc: CG3047
  misc_feature: Homolog of GI Number: 72053245 NR Desc:  similar to protein phosphatase 1
  misc_feature: Homolog of GI Number: 5821151 NR Desc: RNA binding protein
  misc_feature: Homolog of GI Number: 2996650 NR Desc: KIAA0324
  misc_feature: Homolog of GI Number: 48374047 NR Desc: mucin 19
  misc_feature: Homolog of GI Number: 19923466 NR Desc: splicing coactivator subunit SRm300
  misc_feature: Homolog of GI Number: 71891780 NR Desc: KIAA0324 protein
MAKLSCFPALLPGKRKKKTRKITDAIKASGNECPKVKPVEVELIDPTLGAGVVQDVVPAELSVPVEDRDNKEAADQLVSVKESDLSDFDFSFHAAKKPVRSDSGVALDTSADAAVADTSPKLKRSCSNIETKRPGSRSAPEMPARSRSYGDLGNLVAGLALDATATPHGAPEASPASVKTSRTADRVMLKKRSSSQVLPSRSRKLWWRLFLWSHRNLHMPRSARTAHRSFSPGRHDGYTSDTFEEGPAADRKNKTVMVDESPPAASVPNQWVAFCAESSIHDRVSAWVSSIESEPPFDIAEEDDDNYDGEDDEENGECAASQPRHLELGEPSSGKGGNSKSKRCATTADEVVQANTVVQSLNAFSSVAHISGMGLKVVPMIAPFSTLRAVNLSSNLIVHISPGSLPKGLHSLDLSRNKIASVEGLRELTKLRVLNLSYNRISRIGHGLSNCTAIRELYLAGNKISDVEGLHRLLKLAVLDLSFNKITTAKALGQLVANYHSLLALNLVGNPVQANIGDDALRRAVTGLLPSLAYLNKQPVKPQRIAREVATDSIARAALSGSDSRSIRKRTSRRLTQSPRSSSLTRARGGGGGGSPTPRNTSRRR

SEQ ID NO: 9999 - DNA, 1780 bp, Zea mays
  misc_feature: Ceres CLONE ID no. 1584810
  misc_feature: Ceres CDNA ID no. 40352053
  CDS (273)..(1313): REFERENCED BY SEQ ID NO: 10000
aggtgcgcagagcggagatcgacggactttcaattccctctttgctggttaggtaccttggaggcctggcttgcttggacgctccattgcttcgacttcgaagtcgtcgcgggtttggatcctgtgttgagggggtaacaccgtgtagctcaactgtcccctagcgccgccgcgcgaaactccctaccggtccattttgtttgtagccattaagctcttcggaggtggagatctgggctgtcgtttccaggaccctggccgcgtcggctgtgatgggtcgaagcgccttggcggttcggttggcttcccttcttgcgtttggtttggtgctcgtctccgtcgaggccagcctcggggatgttgatccgcgctacagaacttgcgtgagggagtgtcaagctacagggattattggggagaacgtcatcagccattgtcagttcaaagagaactacacttctgttggagtctcttggtataaccaggagcaaatttacatccagtggaaggaactgaactgtaggacagactgtcgctatttttgcatgatgcagagagaaggggaacggcagtcacttggtctgagccctgttaaatatcatggaaagtggccgttcttacgtgtttctgtgttccaggaacccctttcaactgcactatctgctgtcaacctactgatgcacttcactggctggctttcatttttccttctagtgaattacaaattgcctcttagaccccagaccaagagaacttactatgaatacactagcctgtggcatatctatgcaatcttatcaatgaacgcatggttttggagctcaattttccatactcgagacattgagttgactgagaaactggactattcttcagctgtggccctgcttggctactcgttgatcctttcattgctaagggctttcaatgtcaaggatgaggctagcagggtgatgtttgcagcccctattttggcattcgttacaacgcacatcttgtatcttaacttctacgagcttgactatggatggaacatgaaagtctgcgtggtgatggctgcggttcaacttctgacgtgggctgtttgggctggtgtaagccggcatccatcacggctgaaactctggacggttgtttttggaggagcactggtcatgcttcttgagctctacgacttccctccatacatggggtttgccgatgcccattcactgtggcatgcaagcaccattccactcacctatctctggtggagcttcatcaaggacgatgccaaattccgcacgtcaacactcagcaagaaggcaaagtaggtaagcaaagcgccacattcttagcatagggtcagagaggatcagattccgattccgtggtctgcacgggggacattttgggggcacacgtgttgtcggacatcatggaacctcggtatatttgccctccccaaaaaagacattcatcttcatccactcaggtttttggcccacaaaactcagcatactctttagggcgcatgttctgcccttacgaattatctctttactgacctgaacgtgcatcctgtgattggatcggcatcttatatcattgtagtgttggtggggtttgggagattttgtcatcgccgaatcagttttgtgaaatcagacagaacaatgaacatcagtggtgtgtttcctattatgtgtggagttttgtaaattcctgaagcccattttgtatgagttttccaacgttacgaaaaaaaaaaaaaaaaaaaaaaaaaaaaaaaaaaaaaaaa

SEQ ID NO: 10000 - protein, 346 aa, Zea mays
  misc_feature: Ceres CLONE ID no. 1584810
  misc_feature: Ceres CDNA ID no. 40352053
  misc_feature (71)..(342): Pfam Name: Per1 PFAM Desc: Per1
MGRSALAVRLASLLAFGLVLVSVEASLGDVDPRYRTCVRECQATGIIGENVISHCQFKENYTSVGVSWYNQEQIYIQWKELNCRTDCRYFCMMQREGERQSLGLSPVKYHGKWPFLRVSVFQEPLSTALSAVNLLMHFTGWLSFFLLVNYKLPLRPQTKRTYYEYTSLWHIYAILSMNAWFWSSIFHTRDIELTEKLDYSSAVALLGYSLILSLLRAFNVKDEASRVMFAAPILAFVTTHILYLNFYELDYGWNMKVCVVMAAVQLLTWAVWAGVSRHPSRLKLWTVVFGGALVMLLELYDFPPYMGFADAHSLWHASTIPLTYLWWSFIKDDAKFRTSTLSKKAK

SEQ ID NO: 10001 - DNA, 2132 bp, Zea mays
  misc_feature: Ceres CLONE ID no. 1584978
  misc_feature: Ceres CDNA ID no. 25403195
  CDS (360)..(1652): REFERENCED BY SEQ ID NO: 10002
agcactccctccctgcccctgttctctctctcgtggcgacggcgacggcgacgactgggcggccgttgctgccgccctactcgccaggcgcccaggtattcttcggccccttcgccggcgacgagtgtcaccaggttcctcgtctccggaacgcagtgcaaagcagatcgatctcggcccagcaggggcctcacgacttgactcccaagggctcccaaccttgcaggctgactcgatctctttggtttcgtggaccgtgatcagactccagggctggatcgtgtttcttccagtgtgcaagcttggatctcgtaggtctggtttagaaaggaccgtgcttgctctttgctgccgcaatcatgcagagtgggggcgacatgaggcctgtgcacaacagtgtcgatacagttaacgctgctgctgttgccatcgtcaccgcggagagccgcacacagcctcctgctgaacagagaaggaaatgggctgaccggttgagcgtgtacttctgctttggatcacagaagaatggccggcgcatgcgtgtcaaccatgccgcacttgtcccagaacctgcacctcaaaggacagatgcgcctgcagcagaaattccaaaccacccaccgcctcctgtgttcccctttgtggcaccgccatcctctcctgcttctttccttcaatcagaacccacatcaatcgtacaatcaccaagggctggagctccagctttttcgcccctctcaccaaattcccaatccccgacggggccaccatccatctttgctattgggccgtatgcacatgagacacaactcgtctcgcctccagtgttctcggccttcacaactgaaccatcaactgcccctttcactcctcctccggagtctgtccatctgacaaccccttcctctccagaggtcccatatgcaaagcttctgacatcgatcaacaatagcaagaatggtgaagcagggggtgatctccagtcgtatccaaactacccagacagcccaattgggcgcctgatatctccaagctcgggctgttctggcacatcctccccattccctgaccctgagatgcaggcttcttcacgcagcgctttacgcttgttcccagttcgtgagccccctaagatattggatggcgagggcgttgcgacacagaagttgatacctcgccatatgcgcaacggtgggtccctcttggatggccagatctcagcagctgtaccagttgtggacttctctgcccgacttcaacccaacgagcacgcaatggatcaccgggtgtcattcgagttgaccgtcgaagatgtcgcgcgctgccttgagaagaagactgcaatctccggggattctggcacggcatcattccaccttgcaccgaccggcagcggcgaccaccacagagaatccaacgaggcaagggcagggctctacgtcgacgaatcataccatgacttgcccgagaaagcgaggcggtccctgtccctgcgcctggccaaagagttcaatttcaacaacgtcgacgtcggtagcgtggagccgagcgtgggatccgactggtgggcgaacgagaaagtcgccgggatgacaactgagccaaaaaagaactggtctttccacccggtggtgcagcctggggtcagctaacctttgcactgaccataatgatcttatacagggatgaaggaattagcttcttctgcttctgcttctgcttcagtggtcgattccttagggatgacttgccagcttgttctaaacatgcagctagtggtaagttctggatttagatagtaataagtaatggggtgtccaccgtctaatatcgtcatgggatactaaaggtttttattctgggagatgtgacaaaccgcaaactctttggttaggggtcggtcggaactgtcctgttcgtctgttttatcctgataccggtgctgtgttgtgtatgtacataatgaagtagtttttttaaaaaaaagtcaattaaaagggtagaacagtttccttcgataagttgccagatgctaccaaattgcttgtgattgttccctgcccgttcatgatattgttattacagaatttgtgagagaggaaacttctgggatttttctgaaaaaaaaaaaa

SEQ ID NO: 10002 - protein, 430 aa, Zea mays; identical to SEQ ID NO: 9984
  misc_feature: Ceres CLONE ID no. 1584978
  misc_feature: Ceres CDNA ID no. 25403195
  misc_feature: Homolog of GI Number: 51964548 NR Desc: PREDICTED P0474F11.28
  misc_feature: Homolog of GI Number: 34894046 NR Desc: P0436E04.7
  misc_feature: Homolog of GI Number: 12018147 NR Desc: vegetative cell wall protein gp1

SEQ ID NO: 10003 - DNA, 1839 bp, Zea mays
  misc_feature: Ceres CLONE ID no. 1587494
  misc_feature: Ceres CDNA ID no. 36706157
  CDS (63)..(1661): REFERENCED BY SEQ ID NO: 10004
agcagcttacgagcatccaatagcagtagcagagacaagcgcacacacacacaatcgtggcaatggccgacacggccgacgccccgctcctgacaaggcacgggcaggccaagcagccgtccatcgacgacaccatcgagacgtacatcggcgcgaccggttccatgcagctgctcaaggccgtcctgctggcgttcgcgtgggccttcgacgcgcagcaggtgttcatctccgtgttcacggacgcggagccgcagtggcactgcacgggcgcctcggcgtcctgcaagccggccgcgcccccggcctcgccgtgcgcgctcccctccggcgcgtgggcgtgggaccggccggcccacacgacggtggtctccgagtgggcgctcgagtgcgccggcccggcgctcgtctcgctcccggcgtcgtccttcttcgccggctgcctggcgggcgggttcctgctcaccacgctcgcggactcgctcctcgggcgcaggaagatgctgctcacgtccctggtgtccatgtccgtcgccggcgtgctcaccgcgttcgcgcccaacgtgtgggcgtacgccgcgctgcggttcgtgtgcgggttcggccggtccatggtgggcacgtgcacgctggtcctgtccacggagctcgtcgggaagaggtggcgcgagacggtgagcgtggccggcttcatcttcttcaccgtcggcttcctgtccctcccggcgctcggctacacgttacgcgaggcgtcgtggcggagcatgtacctctggacgtccgtgccttcgctctgctactccgtcctgctctacttcctcgcccaggagtcgccgcggtggctgctggtgcgcggcaggaagcaggacgccatggagacgctgcggcagatcgcctcgctcaatggcaacagcatcacgtccagcttctccatgctgcacgcgtgcaacatgcaggaggacgacggggccgccggcggagccgccggcgtgttctccacgatgcgggcgatgtgggagcggccgtgggcgctgcggaggctggcggcgatcatgaccgccagcttcggcgtcggcatggtctactacggcatgccgctcaacgtcggcagcctgggaaccaacctgtacctgagcgtcacgtacaacgctttagccgagctgccgtcggccatcctgtcgttgatcttcatcggcagggtcaaccggcggagctcggtcgtcgcgcttaccgtggcggccggtgccttcagtctcgcgtgcgtcgtcatccccgagggctcggcggcgcgaatggcggccgagttgctctccttcttctcgaccatcacggcgttcaacctcatcctgatctactccatcgagctgttcccgacgtccgtgcgcaactctgcggtggggctggtgcggcaggcgctggtgctgggcggcgtggtggcacctgtgctcgtcgcgctcggccgcgaacggagcttctggtccttcggcgtgttcgggctctgcatcggatgtttggggctctttgccgcctgcctccccgagacgagggggcggagcatgtcggacaccatggaggaggaggagcacaaggaggccgccgccgcggcttgcaccggcgcaaccgacattgccacgaaggatgataccgacctgctcgtgtagcggtgagatgctggttcggcggcgctgctagatatgcctaggctaggcgctgtacaggtacagctagcaggtcaatcacgaagctgtcagcctccatctatccggtcttgtaccgctgccgccaagttgatgcatataattcagaaccagctgtggagtccaaaaaaaaaaaaaaaaa

SEQ ID NO: 10004 - protein, 532 aa, Zea mays
  misc_feature: Ceres CLONE ID no. 1587494
  misc_feature: Ceres CDNA ID no. 36706157
  misc_feature (434)..(506): Pfam Name: Sugar_tr PFAM Desc: Sugar
  misc_feature: Homolog of GI Number: 23507793 NR Desc: At1g16390/F3O9_19
  misc_feature: Homolog of GI Number: 3152576 NR Desc: Similar to liver
  misc_feature: Homolog of GI Number: 50938389 NR Desc: putative organic cation transporter
  misc_feature: Homolog of GI Number: 50938395 NR Desc: putative organic cation transporter
  misc_feature: Homolog of GI Number: 50938381 NR Desc: putative organic cation transporter
  misc_feature: Homolog of GI Number: 53791593 NR Desc: putative solute carrier family 22 member 3
  misc_feature: Homolog of GI Number: 34894854 NR Desc: putative transport protein homolog
  misc_feature: Homolog of GI Number: 31711954 NR Desc: At1g73220
  misc_feature: Homolog of GI Number: 34903624 NR Desc: transport protein
  misc_feature: Homolog of GI Number: 9507117 NR Desc: solute carrier family 22
MADTADAPLLTRHGQAKQPSIDDTIETYIGATGSMQLLKAVLLAFAWAFDAQQVFISVFTDAEPQWHCTGASASCKPAAPPASPCALPSGAWAWDRPAHTTVVSEWALECAGPALVSLPASSFFAGCLAGGFLLTTLADSLLGRRKMLLTSLVSMSVAGVLTAFAPNVWAYAALRFVCGFGRSMVGTCTLVLSTELVGKRWRETVSVAGFIFFTVGFLSLPALGYTLREASWRSMYLWTSVPSLCYSVLLYFLAQESPRWLLVRGRKQDAMETLRQIASLNGNSITSSFSMLHACNMQEDDGAAGGAAGVFSTMRAMWERPWALRRLAAIMTASFGVGMVYYGMPLNVGSLGTNLYLSVTYNALAELPSAILSLIFIGRVNRRSSVVALTVAAGAFSLACVVIPEGSAARMAAELLSFFSTITAFNLILIYSIELFPTSVRNSAVGLVRQALVLGGVVAPVLVALGRERSFWSFGVFGLCIGCLGLFAACLPETRGRSMSDTMEEEEHKEAAAAACTGATDIATKDDTDLLV

SEQ ID NO: 10005 - DNA, 691 bp, Zea mays
  misc_feature: Ceres CLONE ID no. 1587731
  misc_feature: Ceres CDNA ID no. 36707540
  CDS (68)..(484): REFERENCED BY SEQ ID NO: 10006
aacaaatacgcctctgctttagcagtagtttccaaccagaggcaggcacctcgagaggcgggtgaacatggagggcgataagaaggcgggcgccgtggcagagaagaaggcggcggcggcggatcagagcaaggaggtggccgctggtgatgtgagcctgaaggagctgtccaggaggctcaacgacttcgccaaggagagggactgggagcagcaccatagcccccggaacctgctgctcgccatgatcgctgaggtcggggagctgtcagagctgttcatgtggaaaggggaggtgcgcaagggcctcgccgactgggacgaggcggagaaggagcacctcggcgaggagctctccgacgtgctgctctacctggtccgcctctccgacatgtgcggcgtcgacctcggcgacgccgccctcaggaagatcgtcaagaacgccgtcaagtacccggcgccgtccaaggaacaaggcgcctgatgatgacgaacaataccacctgtgatgccttctttgatgctttgggatagctggtgcctggtagagaaccaggcagcgagatatatgaactgatgcttggaccctttttccccctttttttgcggtgcatgctcgaaggttaataattgatacaattattgctcggctgatatgatagcttttttttgcctttaaaaaaaaaaaaaa

SEQ ID NO: 10006 - protein, 138 aa, Zea mays
  misc_feature: Ceres CLONE ID no. 1587731
  misc_feature: Ceres CDNA ID no. 36707540
  misc_feature (51)..(133): Pfam Name: MazG PFAM Desc: MazG nucleotide pyrophosphohydrolase domain
  misc_feature: Homolog of GI Number: 50926452 NR Desc: OSJNBb0070J16.14
  misc_feature: Homolog of GI Number: 49118855 NR Desc: MGC80796 protein
  misc_feature: Homolog of GI Number: 51513481 NR Desc: MGC89294 protein
  misc_feature: Homolog of GI Number: 73536074 NR Desc: Chain B
  misc_feature: Homolog of GI Number: 76653307 NR Desc:  similar to RS21
  misc_feature: Homolog of GI Number: 61809169 NR Desc:  similar to selenophosphate synthetase 2
  misc_feature: Homolog of GI Number: 34877104 NR Desc: similar to RS21
MEGDKKAGAVAEKKAAAADQSKEVAAGDVSLKELSRRLNDFAKERDWEQHHSPRNLLLAMIAEVGELSELFMWKGEVRKGLADWDEAEKEHLGEELSDVLLYLVRLSDMCGVDLGDAALRKIVKNAVKYPAPSKEQGA

SEQ ID NO: 10007 - DNA, 577 bp, Zea mays
  misc_feature: Ceres CLONE ID no. 1587791
  misc_feature: Ceres CDNA ID no. 35383460
  CDS (57)..(353): REFERENCED BY SEQ ID NO: 10008
aaccaactcgatcggtctgctagtgttggagagaagagaatacactacagtactacatggcgaagcagcagcagcagggcatggcggcagtggcgctggtagtgctggtggtgctggcggcgacggcggccgagacggcgtcggcggcttcgtgcaacgccgggcagctggcggcgtgcgcgccggcgatcactgccggcgcgacgccctccgcgtcgtgctgctccaacctcaaggcgcagcaggggtgcttctgccagttcgtgaagaaccccacctacgggcgctacatcaacagccccaacgcgcgcaaggtcgtcgcctcctgcggcgtctccgtgccgcgctgctagtactagtacgtgtgctgtgcatgcatgtacgtgcgcacgtgggctgatcttcctgcttgtttcgtgtcttgccgcgcgccatcaggtgtttgtgtcacttttctgtttagtctctctacatgtgtactggcctcgtgtaccgctcctctatagtcgtgtcgtgtacgggctaattaatatatatacgacgaataaaggatgagttcggcaaaaaaaaaaaaaaa

SEQ ID NO: 10008 - protein, 98 aa, Zea mays; identical to SEQ ID NO: 8880
  misc_feature: Ceres CLONE ID no. 1587791
  misc_feature: Ceres CDNA ID no. 35383460
  misc_feature (33)..(98): Pfam Name: Tryp_alpha_amyl PFAM Desc: Protease inhibitor/seed storage/LTP family
  misc_feature: Homolog of GI Number: 37535858 NR Desc: putative lipid transfer protein
  misc_feature: Homolog of GI Number: 1041815 NR Desc: lipid transfer protein
  misc_feature: Homolog of GI Number: 10803445 NR Desc: lipid transfer protein
  misc_feature: Homolog of GI Number: 24158821 NR Desc: Chain A
  misc_feature: Homolog of GI Number: 3372342 NR Desc: 7 kDa lipid transfer protein
  misc_feature: Homolog of GI Number: 18893 NR Desc: aleurone specific protein
  misc_feature: Homolog of GI Number: 56713103 NR Desc: type 2 non
  misc_feature: Homolog of GI Number: 37535838 NR Desc: putative lipid transfer protein
  misc_feature: Homolog of GI Number: 37535844 NR Desc: putative lipid transfer protein
  misc_feature: Homolog of GI Number: 37535842 NR Desc: putative lipid transfer protein

SEQ ID NO: 10009 - DNA, 580 bp, Zea mays
  misc_feature: Ceres CLONE ID no. 1587962
  misc_feature: Ceres CDNA ID no. 35383461
  CDS (57)..(353): REFERENCED BY SEQ ID NO: 10010
aaccaactcgatcggtctgctagtgttggagagaagagaatacactacagtactacatggcgaagcagcagcagcagggcatggcggcagtggcgctggtagtgctggtggtgctggcggcgacggcggccgagacggcgtcggcggcttcgtgcaacgccgggcagctggcggcgtgcgcgccggcgatcactgccggcgcgacgccctccgcgtcgtgctgctccaacctcaaggcgcagcaggggtgcttctgccagttcgtgaagaaccccacctacgggcgctacatcaacagccccaacgcgcgcaaggtcgtcgcctcctgcggcgtctccgtgccgcgctgctagtactagtacgtgtgctgtgcatgcatgtacgtgcgcacgtgggctgatcttcctgcttgtttcgtgtcttgccgcgcgccatcaggtgtttgtgtcacttttctgtttagtctctctacatgtgtactggcctcgtgtaccgctcctctatagtcgtgtcgtgtacgggctaattaatatatatacgacgaataaaggatgagttcggccaaaaaaaaaaaaaaaaa

SEQ ID NO: 10010 - protein, 98 aa, Zea mays; identical to SEQ ID NO: 8880
  misc_feature: Ceres CLONE ID no. 1587962
  misc_feature: Ceres CDNA ID no. 35383461
  misc_feature (33)..(98): Pfam Name: Tryp_alpha_amyl PFAM Desc: Protease inhibitor/seed storage/LTP family
  misc_feature: Homolog of GI Number: 37535858 NR Desc: putative lipid transfer protein
  misc_feature: Homolog of GI Number: 1041815 NR Desc: lipid transfer protein
  misc_feature: Homolog of GI Number: 10803445 NR Desc: lipid transfer protein
  misc_feature: Homolog of GI Number: 24158821 NR Desc: Chain A
  misc_feature: Homolog of GI Number: 3372342 NR Desc: 7 kDa lipid transfer protein
  misc_feature: Homolog of GI Number: 18893 NR Desc: aleurone specific protein
  misc_feature: Homolog of GI Number: 56713103 NR Desc: type 2 non
  misc_feature: Homolog of GI Number: 37535838 NR Desc: putative lipid transfer protein
  misc_feature: Homolog of GI Number: 37535844 NR Desc: putative lipid transfer protein
  misc_feature: Homolog of GI Number: 37535842 NR Desc: putative lipid transfer protein

SEQ ID NO: 10011 - DNA, 874 bp, Zea mays
  misc_feature: Ceres CLONE ID no. 1588054
  misc_feature: Ceres CDNA ID no. 25446038
  CDS (220)..(561): REFERENCED BY SEQ ID NO: 10012
aatctcccgagagctgactaaggctgctgctcgcatttcttctgtagctagcaatagcaatctctcttgctccctgcaagaaaaaaaaaagagagagagagagagctagcgagggagaaagatcaataatcgtcaagcaaatcttgacttctgagctagcttccgatccatatatatacacacacgttgctcactgctgtgcacagctgcagcgtgcccatggcgacgataaggaagcatgtgtccgtccccgccatcctgctagcgctggccgtcctctcctgcctgctcctcgtctccgcggcaggcaaccggagggctctgctgccgagggagccagccgacacctacgccggtggtggacgtggacaggtggtgttgccgacgacgacgacggcggcggaggagggtgctgccgtgctgggagctgagctcgctgaagccgagcgggacgagacgatggtggtggatacggcggccaggagggcggggctgctgcagactcaggactacccggggtctggccccaacggccgccatgatccgcggaacccgcactgattctgattgagcttgtattgtcgtcccggatgctgcatgcgctgcctcgacactgaacaacacaacacgcgtataattatgcgtataacgtattatatacatacgcatgtttagtcacaccataattttgcatatctagctagacacacatataagtagtccacatatgaaggaaaaatgaatgtctgaaattagttcatctcgtgaatgacaaccaataaggccggctggcgctggcatgtgaatgcacttccatcttgttttcagttaattttcaagtacaagtattttgtgatcaaaaaaaaaaaaaaaa

SEQ ID NO: 10012 - protein, 113 aa, Zea mays
  misc_feature: Ceres CLONE ID no. 1588054
  misc_feature: Ceres CDNA ID no. 25446038
MATIRKHVSVPAILLALAVLSCLLLVSAAGNRRALLPREPADTYAGGGRGQVVLPTTTTAAEEGAAVLGAELAEAERDETMVVDTAARRAGLLQTQDYPGSGPNGRHDPRNPH

SEQ ID NO: 10013 - DNA, 648 bp, Zea mays
  misc_feature: Ceres CLONE ID no. 1588095
  misc_feature: Ceres CDNA ID no. 40352054
  CDS (395)..(529): REFERENCED BY SEQ ID NO: 10014
aagcgctggcgccgcagacccctccccttcgcttccttccctagcgccgacgcccaccagacgagatggccccgaagaaggacaaggccccgccgccgtcgtcgaagccggccaagtccggtggtggcaagcaaaagaagaagaagtggagcaagggaaagctaaaggagaaggtaaacaacgcggtgctgttcgaccaggctacctacgacaagctgctctcggaggtgcccaagtacaagcaaatcaccccttccatcctctccgagcgtctgaggatcaacggctcccttgctcggagggccatcaaggacttgatggcgcgtggcctcattcggatggtctcggtccactcaagccagcagatctacaccagggcaaccaatacataaggatggggaagaggtctaaaatgcattgtctgccctctctgcaggaggagctcgtctttagaacagttgccatctttgtcaagagttgccaatgttatgttactggtgatgagttccaggtgacggcaacattttagagattttgagtatttctattagttggtactatggtttgccaattataagttacttggcctaaaaaaaaaaaaaaaaaaaaaaaaaaaaaaaaaaaaaaaaaaagaaaaaaaaaaaaaaa

SEQ ID NO: 10014 - protein, 108 aa, Zea mays
  misc_feature: Ceres CLONE ID no. 1588095
  misc_feature: Ceres CDNA ID no. 40352054
  misc_feature (1)..(106): Pfam Name: Ribosomal_S25 PFAM Desc: S25 ribosomal protein
MAPKKDKAPPPSSKPAKSGGGKQKKKKWSKGKLKEKVNNAVLFDQATYDKLLSEVPKYKQITPSILSERLRINGSLARRAIKDLMARGLIRMVSVHSSQQIYTRATNT

SEQ ID NO: 10015 - DNA, 650 bp, Zea mays
  misc_feature: Ceres CLONE ID no. 1588102
  misc_feature: Ceres CDNA ID no. 25446039
  CDS (73)..(477): REFERENCED BY SEQ ID NO: 10016
aggtcaaaaaaaaaaaaaaaaaacagcggcacagaggtgcgacgtacgacgacgacgacgcaggcgccacacatgacatcccagctctccgccgccgtgccccggttccacggcctccggggctacgccgcgcccaggtccgcggtggcagcgctgccgtccgtgagggtgggcaggaagaggtcgtcgtcgcagggcatccgctgcgactacatcggctccgccaccaacctgatcatggtgacgacgacgacgctgatgctgttcgcggggcggttcgggctggcgccgtcggcgaaccgcaaggcgacggcggggctgaagctggaggcgcgcgactccggcctgcagacgggtgaccccgccgggttcaccctcgccgacacgctggcctgcggcgccgtcggccacatcctcggcgtcggcatcgtgctcgggctcaagaacaccggcgccctcgaccagatcatcggctagatccctacgtcgtcgttgttaagatcagactcagcagcctcgatcgcgccgccggccggcaggtgcctgcaggtggtgactttgtaacgtgtgtgcgtgcgtacgtgtacattgcatccatcttggttccaatggacatatagctcctgttgctcctctgaaaaaaaaaaaaa

SEQ ID NO: 10016 - protein, 134 aa, Zea mays
  misc_feature: Ceres CLONE ID no. 1588102
  misc_feature: Ceres CDNA ID no. 25446039
  misc_feature (49)..(129): Pfam Name: PSI_PSAK PFAM Desc: Photosystem I psaG / psaK
  misc_feature: Homolog of GI Number: 50934217 NR Desc: photosystem I protein
  misc_feature: Homolog of GI Number: 548605 NR Desc: Photosystem I reaction center subunit psaK
  misc_feature: Homolog of GI Number: 18491111 NR Desc: At1g30380/T4K22_2
  misc_feature: Homolog of GI Number: 5738540 NR Desc: photosystem I subunit X precursor
  misc_feature: Homolog of GI Number: 21555328 NR Desc: Photosystem I reaction center subunit X
  misc_feature: Homolog of GI Number: 30013661 NR Desc: photosystem I reaction center subunit X psaK
  misc_feature: Homolog of GI Number: 58892561 NR Desc: photosystem I reaction center subunit X PSI
  misc_feature: Homolog of GI Number: 3885511 NR Desc: similar to PSI
  misc_feature: Homolog of GI Number: 16930767 NR Desc: photosystem I subunit X precursor
  misc_feature: Useful for making bigger plants
MTSQLSAAVPRFHGLRGYAAPRSAVAALPSVRVGRKRSSSQGIRCDYIGSATNLIMVTTTTLMLFAGRFGLAPSANRKATAGLKLEARDSGLQTGDPAGFTLADTLACGAVGHILGVGIVLGLKNTGALDQIIG

SEQ ID NO: 10017 - DNA, 722 bp, Zea mays
  misc_feature: Ceres CLONE ID no. 1588151
  misc_feature: Ceres CDNA ID no. 25446040
  CDS (83)..(412): REFERENCED BY SEQ ID NO: 10018
aattcattaccggaagagaaaaaagtaactcggaaaagaaggagacgccgaaaattcgaaaggggaggggaaagcaaagctgatggcggaggcccaggggaaagcaaagcaaatggcggaggccccgagcaagatcgaatccatgaggaagtgggtcgtcgagcacaagctccgagccgtaggttgcctctggctaggtgggatcagcagttcgatcgcctacaactggtcgcggcccaatatgaagcctagcgtcaagatcatccacgcaaggttgcatgctcaagctctaaccctggctgcattagttggttctgcatgcgtggagtactatgaccagaagtatggttcttctgggccaaaggtggacaaatacacaagccaatacctggcccattcgcataaagattaaaggtcgccatgttggttcctgcatgccggattaattttgggctcatctcgggttgctcatgagtcatgacccgcccatggatgctggatgtttattcttttttttgtcttcataattacaaaatggtggtgtacttgccaggcaaatgttaatgagggtataatgcagatattgtcgtcataatttggcctcatgttgcattatctaacctcactttgttgactgtcagcgactcagcgtctatgatttttttatattttttgagaaaaggaaaagaaatcccggtttgtgcctaaaaaaaaaaaaaaaa

SEQ ID NO: 10018 - protein, 99 aa, Zea mays
  misc_feature: Ceres CLONE ID no. 1588151
  misc_feature: Ceres CDNA ID no. 25446040
  misc_feature (1)..(71): Pfam Name: HIG_1_N PFAM Desc: Hypoxia induced protein conserved region
  misc_feature: Homolog of GI Number: 51964126 NR Desc: PREDICTED OSJNBa0016G10.13 gene product
MAEAPSKIESMRKWVVEHKLRAVGCLWLGGISSSIAYNWSRPNMKPSVKIIHARLHAQALTLAALVGSACVEYYDQKYGSSGPKVDKYTSQYLAHSHKD

SEQ ID NO: 10019 - DNA, 715 bp, Zea mays
  misc_feature: Ceres CLONE ID no. 1588254
  misc_feature: Ceres CDNA ID no. 25445982
  CDS (187)..(450): REFERENCED BY SEQ ID NO: 10020
ccaaacaccccctaattaaatttgtaccgcaggttagctagatctctacgttagtgcttgatttgatttgtttaacttcccatcgtaaaagttgctcagatcccatgtagttcagctttgttttcttatagatcagttggatgtacttgcttttttgtataaaggattgagggagaggaagcaaaaatgactgtatgggagaatatgcagaaagctgaagcagaagcagccatacaaaagcttgtgataaaacttgaaaagaaaaggccatactcgctggagaggattttcaacacccttaggtctggctctcggaagacacaggtggtacgcagtacatcaaccgcaaatcagaatcagcatatttccagaactatcaaaacggcgccaaacctcagcaagaacggtcaaatgagttcattgagtggatgcttcagacaagatctatagcatggatcataatctggattgtccttaagtttttattgtgctaggggaacataagaaagtatgtagagcaaaatgagaggagctgttgttaccctcaattctttgtgattattgtgctagagtgatgtagttgttggcttttgaacaatagctggagtgatatgaaacattagtgatctagttgtgaatgatattataattgtgatgcttttgtgaatatataattgtggtgcttttgtgtttatgagaaaaaaaaaaaaaaaaa

SEQ ID NO: 10020 - protein, 87 aa, Zea mays
  misc_feature: Ceres CLONE ID no. 1588254
  misc_feature: Ceres CDNA ID no. 25445982
  misc_feature: Homolog of GI Number: 51536297 NR Desc: remorin protein
  misc_feature: Homolog of GI Number: 50913115 NR Desc: remorin protein
  misc_feature: Homolog of GI Number: 42571771 NR Desc: remorin family protein
MTVWENMQKAEAEAAIQKLVIKLEKKRPYSLERIFNTLRSGSRKTQVVRSTSTANQNQHISRTIKTAPNLSKNGQMSSLSGCFRQDL

SEQ ID NO: 10021 - DNA, 730 bp, Zea mays
  misc_feature: Ceres CLONE ID no. 1588316
  misc_feature: Ceres CDNA ID no. 40352055
  CDS (613)..(729): REFERENCED BY SEQ ID NO: 10022
aatctgaaaagttcagagtagtgtgtttttctttgttaagtcctttatttctctgcctgtctatgtgtttatatatcaacgtactagtttgttttgcgccaaccacaaacttgtgagcaggcgctgttccgtaaaattgctgctgcacttcctggaatggagacgctctcatcagcgaagcaggaagacatggttgatgtgaacttgaggtccggcaatgcaaactcgtcccagtctcaggctcaggctgggggatgcagttgttagttgcagtctctgacacttgcttgctcatgatctttgggactctgagcatcagaaggcgttatcactgatgcttctctcgggaagaagagttgattgcctctcgccagtgaacacaccatagtctttacccggtgaatggaccgtttgcattggaacgatacgttttatgagttttctgttatttcctcagtggcctaagctagcaacagtgtatagttgggttgacactcaaacttctaccattcgagttgggtattagaactagttattattggttcatgttgaacttatatatatttccatccttttgcagttagtttgagtcatatttgctgtgtaccaaacatgtattgcaaatttggaatttttgtaagctataataaggccagcacggcaatatccccacaaaaaaaaaaaaaaaaaaaaaaaaaaaaaaaaaaaaaaaaaaaaaaaaaaaaaaaaa

SEQ ID NO: 10022 - protein, 36 aa, Zea mays
  misc_feature: Ceres CLONE ID no. 1588316
  misc_feature: Ceres CDNA ID no. 40352055
METLSSAKQEDMVDVNLRSGNANSSQSQAQAGGCSC

SEQ ID NO: 10023 - DNA, 555 bp, Zea mays
  misc_feature: Ceres CLONE ID no. 1588372
  misc_feature: Ceres CDNA ID no. 35383462
  CDS (64)..(426): REFERENCED BY SEQ ID NO: 10024
aagccgctcctgccagtgccatcacacgtcccgagagcagcgcctgagcggagcccaggacccatggccgtcaccgccgtcgcggcgtctctgtccgtggcgcagggtctcgggaagcctctctgcgccggcaggaacgcgacgtcgcgccgggccgtcgcgctcgcgccccgtcgttcggcgacccggatggccgtcgtccgggcgtcgtccgcgcatcagaagcagcacccggccaaggagtgggcggccgcggcggccgtggcggcggcgctggtgctgccggaggtcgcggaggccgcgcccgggatctcgccgtcgctcaagaacttcctcctcagcatcgtctccggaggcgtcgtgctcgtcgccatcgtcggcgccgtcgtcgctgtctctaacttcgatcccgtcaagcggcgctgagctcaatcaactacacgtgcacacatgcatgcagcgttgtatgttgcattgcatgctgtacgccgcctgtacctatgtactacttcccaatgtaaacagcgtttaatctgtgaaaaaaaaaaaaaaaaa

SEQ ID NO: 10024 - protein, 120 aa, Zea mays
  misc_feature: Ceres CLONE ID no. 1588372
  misc_feature: Ceres CDNA ID no. 35383462
  misc_feature (83)..(120): Pfam Name: PsbX PFAM Desc: Photosystem II reaction centre X protein
  misc_feature: Homolog of GI Number: 50939905 NR Desc: putative ultraviolet
  misc_feature: Homolog of GI Number: 45356861 NR Desc: ultraviolet
  misc_feature: Homolog of GI Number: 33520421 NR Desc: ultraviolet
  misc_feature: Homolog of GI Number: 18476498 NR Desc: ultraviolet
  misc_feature: Homolog of GI Number: 54638018 NR Desc: GA19333
  misc_feature: Homolog of GI Number: 67988031 NR Desc: ROK
MAVTAVAASLSVAQGLGKPLCAGRNATSRRAVALAPRRSATRMAVVRASSAHQKQHPAKEWAAAAAVAAALVLPEVAEAAPGISPSLKNFLLSIVSGGVVLVAIVGAVVAVSNFDPVKRR

SEQ ID NO: 10025 - DNA, 774 bp, Zea mays
  misc_feature: Ceres CLONE ID no. 1588376
  misc_feature: Ceres CDNA ID no. 25445983
  CDS (117)..(518): REFERENCED BY SEQ ID NO: 10026
actcctcccctcttctcactcagctcaccagtgctcgctcacctttcccctccctttcctttcctttgctttcctatccttgtgccctcgaactcgaatcggaaacccagccagccatgtcgtactacggcgaccggcgcgcggagtcgtcgatcgtggaggcgttcacgctgtcgccgctgccgtacccggtgatcctggtgctgctgatggtgacgctgctgctgggcgcctcgtggttcttcacgtacgacgacttcatcgaggaggcgtcgcagcagctgagctgggcgctgctgggcgtgcccatcgcgctcgtcctcctcatccgctggatctcctccgtcgactccttcgagggctacctgggcttctacccgagggagagccgctggaagggccgctacgagcggggccccgccgagggcagctcgccctggggcgtcgccttgctcgtcctcctcctcctcgtgctcgccagcttccactccaccatccacgacatgtgggggccgtgaacggccggatgtgggtcctgctcctgttcgattccacgcgcgcacgtatgcgattgtactgctggttgctgcttgatcgatcgatggatcgatgattccatgtacatatttgatagggggatgctgctgctaggctattagctgcaggctatagagtttgagggtgatatacttatcagtttgctgcctgtaagactggttttggttttgctataatcgtgatgtattcagatgtacagtgaaaaaaaaaaaaaaa

SEQ ID NO: 10026 - protein, 133 aa, Zea mays
  misc_feature: Ceres CLONE ID no. 1588376
  misc_feature: Ceres CDNA ID no. 25445983
  misc_feature: null
  misc_feature: Useful for making plants with modulated nitrogen use efficiency
MSYYGDRRAESSIVEAFTLSPLPYPVILVLLMVTLLLGASWFFTYDDFIEEASQQLSWALLGVPIALVLLIRWISSVDSFEGYLGFYPRESRWKGRYERGPAEGSSPWGVALLVLLLLVLASFHSTIHDMWGP

SEQ ID NO: 10027 - DNA, 854 bp, Zea mays
  misc_feature: Ceres CLONE ID no. 1588435
  misc_feature: Ceres CDNA ID no. 25446041
  CDS (287)..(649): REFERENCED BY SEQ ID NO: 10028
actctcgccatccatctcgtgcacgactgggcaaccgttgccgctgtcgaggtgcccaggtcttcatcggtccctcgtcagttcttctccggcccttcgccgccgacaagctcccccagtacttatgttaccaaagcaaggctagtaaatcataccggaaagaatggtgatggcgtcttggtcttgggtctgctagatgcatgcctactgccttatcgcaaagctagcttacctggtcatacgaatttgtactactgaagagacaggagcaaagagttaacaggagatgaatgcccctgaccgttatgagcgtttcgtcgtgccagagggcaccaagaaagtgtcctatgagagggatacaaagattgtgaatgctgcatcattcactgtcgaacgcgaggatcacactgtaggcaatatcctccgcatgcagttgcacagagacccaaatgttctctttgccgggtataagctccctcacccactccagtacaagatcattgttaggatccacacaacgagccagtcctccccgacgcaggcctacacccaggctatcaatgatctagacaaagagcttgagtaccttaagcaagcttttgaggatgagaagaacaggtacgaggacaggatgaagcaggggttctagatgaatggaatagtgtgggagataaacttcctgtgttagttttatcctaggcgagtcaacaatgaaacgaacgcccaaggattgtgaatgtctgatccctgaactaaggttgcttgctgtcgttttactgtcatgcttgtgtcaatattcgtattattgcaaacacaccaatggagttttacattggcaaaaaaaaaaaaaaaaa

SEQ ID NO: 10028 - protein, 120 aa, Zea mays; identical to SEQ ID NO: 1570
  misc_feature: Ceres CLONE ID no. 1588435
  misc_feature: Ceres CDNA ID no. 25446041
  misc_feature (29)..(103): Pfam Name: RNA_pol_L PFAM Desc: RNA polymerase Rpb3/Rpb11 dimerisation domain
  misc_feature: Homolog of GI Number: 50934495 NR Desc: putative DNA
  misc_feature: Homolog of GI Number: 29029080 NR Desc: At3g52090
  misc_feature: Homolog of GI Number: 54644890 NR Desc: GA19897
  misc_feature: Homolog of GI Number: 19921456 NR Desc: CG6840
  misc_feature: Homolog of GI Number: 57087487 NR Desc:  similar to DNA
  misc_feature: Homolog of GI Number: 6755362 NR Desc: polymerase
  misc_feature: Homolog of GI Number: 11595485 NR Desc: RPB11a protein
  misc_feature: Homolog of GI Number: 34873368 NR Desc: similar to DNA
  misc_feature: Homolog of GI Number: 76653872 NR Desc:  similar to DNA

SEQ ID NO: 10029 - DNA, 728 bp, Zea mays
  misc_feature: Ceres CLONE ID no. 1588464
  misc_feature: Ceres CDNA ID no. 36707541
  CDS (72)..(440): REFERENCED BY SEQ ID NO: 10030
aaccaaaggtatcttgcaatcacaacgaacaaaagctctcgatctcaccgacaccgaggaagaagagatcaatggcgtccgagcagggagtcgtgatcgcgtgccacagcaaggctgagtttgacgcccacatgaccaaggcccaggaagccggcaagctggtggtcatcgacttcactgccgcctggtgcggtccatgccgcgccatcgccccactgttcgtcgaacacgccaagaagttcactcaggtcgtcttcctgaaggtggacgtggacgaagtgaaggaagtcaccgcggcctacgaggtcgaggcgatgccgaccttccacttcgtcaagaacggcaagacggtcgcgaccatcgtgggtgccaggaaggacgagctcctggccctgatcgagaagcatgccgcgcctgcgcctgcgactgcgtctgcctaaatgagatcagatcagtcgtcgccgtcaataagggccagcacgtatggctgtaaatgttgtcgttatcagttctggctttgtcgtttgtgggcgatttgtgaactagtagtatgtttgtttctatccgagccggaggcgatacttaaccatggatacttgttgtgagttcgtttctgttcgcgtgtgactcttgaattgaatcaaccagctcaccactgcaccaggccgtggtgagtggtgacagtgatttcctgttaaaaaaaaaaaaaaaaaaaaaaaaaaaaaaaa

SEQ ID NO: 10030 - protein, 122 aa, Zea mays; identical to SEQ ID NO: 16
  misc_feature: Ceres CLONE ID no. 1588464
  misc_feature: Ceres CDNA ID no. 36707541
  misc_feature (8)..(114): Pfam Name: Thioredoxin PFAM Desc: Thioredoxin
  misc_feature: Homolog of GI Number: 66841004 NR Desc: thioredoxin h2 protein
  misc_feature: Homolog of GI Number: 82407383 NR Desc: Chain A
  misc_feature: Homolog of GI Number: 50934769 NR Desc: Thioredoxin H
  misc_feature: Homolog of GI Number: 27461140 NR Desc: thioredoxin H
  misc_feature: Homolog of GI Number: 32186040 NR Desc: thioredoxin h isoform 1
  misc_feature: Homolog of GI Number: 20047 NR Desc: thioredoxin
  misc_feature: Homolog of GI Number: 53748515 NR Desc: thioredoxin 1
  misc_feature: Homolog of GI Number: 40287476 NR Desc: thioredoxin
  misc_feature: Homolog of GI Number: 55670844 NR Desc: Chain A
  misc_feature: Homolog of GI Number: 33621084 NR Desc: thioredoxin H3

SEQ ID NO: 10031 - DNA, 576 bp, Zea mays
  misc_feature: Ceres CLONE ID no. 1588480
  misc_feature: Ceres CDNA ID no. 25446042
  CDS (131)..(304): REFERENCED BY SEQ ID NO: 10032
accccacctccccactcgagccagccagccagccagccagccgcttgggcgccatctctctagagcttcgtaccctcgaagagagatccggcgcggcccaataaacacccggctcactacagactcgcagatggccggcctcaggatgaagttcgtcgccgtcgccgccatggccgccgcgctcgtggcgtccgccgcagccgccgaggcccccgccccggctcccgcgtccgacgccgcggccgccgtacccctcgccgcggcctccctcgccgccgccgccttcggctacctcttctgctagatccgcgctggatacgtggttcctgctccaaaatatgattcgtctggtctggcgcgcgtgagtccagctcgtgtgtcgtgcgtgtctctgtgtgaggtgtcggcgggcgtgtgtatgtatggagtcggccgcggcggcggaggaggtctgcgcgtggtggtggtggtacgtgcttcgacgcgccactgtttgtcgcggcgatcatgtactaccctgctgcgttttctggttatcaatgagatgatttatttgatacaagaaaaaaaaaaaaa

SEQ ID NO: 10032 - protein, 57 aa, Zea mays; identical to SEQ ID NO: 8426
  misc_feature: Ceres CLONE ID no. 1588480
  misc_feature: Ceres CDNA ID no. 25446042
  misc_feature: Homolog of GI Number: 19919 NR Desc: Pistil extensin like protein
  misc_feature: Homolog of GI Number: 539029 NR Desc: cysteine
  misc_feature: Homolog of GI Number: 46396546 NR Desc: Chitin
  misc_feature: Homolog of GI Number: 539030 NR Desc: cysteine
  misc_feature: Homolog of GI Number: 6523547 NR Desc: hydroxyproline
  misc_feature: Homolog of GI Number: 76262498 NR Desc: pherophorin
  misc_feature: Homolog of GI Number: 53717377 NR Desc: hemagglutinin domain protein
  misc_feature: Homolog of GI Number: 34912294 NR Desc: putative extensin

SEQ ID NO: 10033 - DNA, 693 bp, Zea mays
  misc_feature: Ceres CLONE ID no. 1588556
  misc_feature: Ceres CDNA ID no. 25401995
  CDS (3)..(515): REFERENCED BY SEQ ID NO: 10034
agaccctagaaaaaaccagcgtcgccaccgcccgctcccaccactccgccaccgtctcccccggcaagcccgccgcccgctcccgccaccccgccaccgtctccgcccatggcgccacctcccgccacgccccctccacccgccaccccgccgccaccggccgcgcccacgccggccccgagcgtggccccgactcccccgcccgtggcgacaccggctgcgtcccccaagagccccaagacgccgagccccgccgccgcgacgtccccggcgccctcgctctcgcccgcgggcacgccgacgaacgaggactcgggtgcaagcgcgcgcgcggtcggcttcgccacggtggtggcgttggcgggcgcgggcctcgccgttctgctttgagtagtagactccgactcttcctcctgtcctcacgccgatgtcgtcacctcctccccgtgcctcgacgttgctgctcgctccatttcagtttcatcttttttttttcctttggtgttgttatttaattttaccggccctacgatcgattcttgatgtacacgatgatgatgatgatgcattggttgctttggatccgcgggcgggtggtggttagtgttctgcccgcgggtgtcgccatgtacttttaccgcactacattttggttctatagagagaggatttgtgcaaaaaaaaaaaaaaaaa

SEQ ID NO: 10034 - protein, 93 aa, Zea mays
  misc_feature: Ceres CLONE ID no. 1588556
  misc_feature: Ceres CDNA ID no. 25401995
  misc_feature: Homolog of GI Number: 6523547 NR Desc: hydroxyproline
  misc_feature: Homolog of GI Number: 76262500 NR Desc: pherophorin
  misc_feature: Homolog of GI Number: 76262498 NR Desc: pherophorin
  misc_feature: Homolog of GI Number: 7441828 NR Desc: extensin
  misc_feature: Homolog of GI Number: 7441829 NR Desc: proline
  misc_feature: Homolog of GI Number: 12018147 NR Desc: vegetative cell wall protein gp1
MAPPPATPPPPATPPPPAAPTPAPSVAPTPPPVATPAASPKSPKTPSPAAATSPAPSLSPAGTPTNEDSGASARAVGFATVVALAGAGLAVLL

SEQ ID NO: 10035 - DNA, 659 bp, Zea mays
  misc_feature: Ceres CLONE ID no. 1588606
  misc_feature: Ceres CDNA ID no. 25446043
  CDS (181)..(450): REFERENCED BY SEQ ID NO: 10036
agttacaatctcaaataactccgtcccttccggccttccctctatctttcgctcgctctcggcgacagctgggcgaccgtcgtcgccgccgcccttctctaggtgcccaggtcttcgccggtccctttgccgcctcttcgccgccgatgagcaccagccaggaagaaaagaagctgaaccatggggaagagaaagtcagctgctaagccacctcctaagaagcggatggacaagcttgacactgtcttttcctgcccattctgcaaccacgggagtagtgttgagtgccgaattgacatgaagaatctgattggcgaagcatcttgtagaatctgtcaggaaaacttcagcacaactgttaatgcactcactgagcctattgatatatatagtgaatggattgacgagtgtgagcgtgtcaacactgttgaaggcgacgatgatgcgtgagcttgccccatgcgatgaaactgttacctaccatcgtaatgtaatgtgctagtattctcgaatgccatagcccatagtcagccatggcttggaataacgtagtggctgactgatatgccagtaggcaccttatctagtacttacagaactacaaaaagtttgtattatacatatatggacaaccttataagcaaaaaaaaaaaaaaaaa

SEQ ID NO: 10036 - protein, 89 aa, Zea mays; identical to SEQ ID NO: 390
  misc_feature: Ceres CLONE ID no. 1588606
  misc_feature: Ceres CDNA ID no. 25446043
  misc_feature (8)..(68): Pfam Name: DUF701 PFAM Desc: Putative zinc binding domain
  misc_feature: Homolog of GI Number: 51771080 NR Desc: similar to RIKEN cDNA 1110011K10
  misc_feature: Homolog of GI Number: 51771082 NR Desc: similar to RIKEN cDNA 1110011K10
  misc_feature: Homolog of GI Number: 51771364 NR Desc: similar to RIKEN cDNA 1110011K10
  misc_feature: Homolog of GI Number: 45190840 NR Desc: AER237Wp
  misc_feature: Homolog of GI Number: 51771084 NR Desc: similar to RIKEN cDNA 1110011K10
  misc_feature: Homolog of GI Number: 48141171 NR Desc: similar to ENSANGP00000010721
  misc_feature: Homolog of GI Number: 34860564 NR Desc: similar to RIKEN cDNA 1110011K10
  misc_feature: Homolog of GI Number: 46227109 NR Desc: protein with conserved N

SEQ ID NO: 10037 - DNA, 743 bp, Zea mays
  misc_feature: Ceres CLONE ID no. 1588624
  misc_feature: Ceres CDNA ID no. 25446044
  CDS (3)..(440): REFERENCED BY SEQ ID NO: 10038
actctcttcagtctctccccttcgcggctcccacccaccgcgtgccgccgccctacgccaggtgccccctacgtacgtcgtcatcgtgcccgtggccgccggcgacgaacgcccagcaggtaacgccaccccccctactccctccttaccccttcccgccgtgcgaaaccgagcgcataaaccctaacgtaagcgctctttgtgcccggaagggggaaagggagagggaggaggaggatgggcgagttcgacgactactgggcgcgggcgtacaggggcgaccccgcggtcccgcactccgacccgcagcggctcatctccacctggaccggcgcctttgccctcggcgcggccgcctgcgtccaccaccacgcctccgcgctcgcatcccacctcaagtccctaccggcgactttgcaagacatgacattggcccttgatcaaaagcgatggaagaaagcttttgagaaaaagcggcagcaaccttaagctcattgttctttccaacttcttgggccagttggatgagcactgtgtctggtcatcaattgtggcgcatgaagcttcaaaattctctctatatacatatgatgtattgactgaggttctacttttggttttcttgtttagcgttacaactttctcagtttgtgtatttgctccatctcagatcatcagatgacattcagaatgatttgtctattcttaaattctctattatctttttaaaaaaaaaaaaaaaa

SEQ ID NO: 10038 - protein, 83 aa, Zea mays; identical to SEQ ID NO: 874
  misc_feature: Ceres CLONE ID no. 1588624
  misc_feature: Ceres CDNA ID no. 25446044

SEQ ID NO: 10039 - DNA, 702 bp, Zea mays
  misc_feature: Ceres CLONE ID no. 1588630
  misc_feature: Ceres CDNA ID no. 25446045
  CDS (138)..(539): REFERENCED BY SEQ ID NO: 10040
aacaagccgcaccgcaattagccgcgaccctccgcagaatcggctcacgtttccgatccagaggtccagactgttccccgagttttcccactgtgtcctctcctcgcgagtcccggcgaagcaggcgaaccgcgaacatgtgccccaccggcaggtacctggggctcgacctctccggcgctggcggcgacctgaggccggcgttcgacgtgcttgacgcggaccgcgacggcttcgtgcagtacgacgagttcgagcgcctgctggccggccgcgccgcggcggccgccgccgccgcgggaggcgctgggcgccgctccgccatggagggcgccttccggctcatggaccgggacggggacggtatggtcggcttcgaggacctcaaggcctacctcgactgggccgggatgcccgcggcggacgaggaggtccgcgccatgatccgcgtcgctggcggaggggacggcggtgaaggcgtggggctcgaggcgctagccggagtgctcgcggtcgacctggaaggcatcgccttttgattttgagagatccatgggctgttgtgcggagtactgtattctttttcttggggttttcggttggtgagcgtggtgcgttgtctgtcgattgtctgtggttgactggggttcacggaggaccattcaaaacgagataaaaagttcgcaaaaaaaaaaaaaaaaa

SEQ ID NO: 10040 - protein, 133 aa, Zea mays
  misc_feature: Ceres CLONE ID no. 1588630
  misc_feature: Ceres CDNA ID no. 25446045
  misc_feature (62)..(87): Pfam Name: efhand PFAM Desc: EF hand
  misc_feature: Homolog of GI Number: 5702231 NR Desc: hypersensitive reaction associated Ca2+
  misc_feature: Homolog of GI Number: 10177614 NR Desc: NaCl
  misc_feature: Homolog of GI Number: 2352828 NR Desc: NaCl
  misc_feature: Homolog of GI Number: 66780099 NR Desc: PE
  misc_feature: Homolog of GI Number: 68562394 NR Desc: L
  misc_feature: Homolog of GI Number: 72537715 NR Desc: hypothetical phage protein
  misc_feature: Homolog of GI Number: 67985765 NR Desc: Pantoate
  misc_feature: Homolog of GI Number: 66776103 NR Desc: LigA
MCPTGRYLGLDLSGAGGDLRPAFDVLDADRDGFVQYDEFERLLAGRAAAAAAAAGGAGRRSAMEGAFRLMDRDGDGMVGFEDLKAYLDWAGMPAADEEVRAMIRVAGGGDGGEGVGLEALAGVLAVDLEGIAF

SEQ ID NO: 10041 - DNA, 760 bp, Zea mays
  misc_feature: Ceres CLONE ID no. 1588642
  misc_feature: Ceres CDNA ID no. 25446643
  CDS (185)..(397): REFERENCED BY SEQ ID NO: 10042
aagaagcgaggaaaggtgaggccgatagatagaggagctgcggcgccgccggcgagcgaagagtggaggatccgatccgaagcgagaggactgaatcctgcggccgggagggacgcgggaccacgacgagcgtcgtcgtcggtgccaagcaacggcagttgtccctgtccagagcacaggtaagatggttaacgcgatcaaggggctgttcatctcctgcgacgtacctatggcgcagttcatcgtcaacctgaacgcgtcgatgccgccgtcggagaggttcatcgtgcacatgctcgaccctaccaacatgttcgtgcagcctcacgtggcgcacatgatcaggagcaagatcggggagttcagggaccagaacagctacgagaagccgcagtagtggaggatcaaccgcgtcctacactcctacctcgggacttgctttcgttgcctgtattatttctgctgtgagctgagcacctcagcggaaacgagtacgccaaatagatcccacctgtggccttgaaatcagggcatgtacagtgggtgtcttaagttgtgtcttagagtgtgtctaggggggtgaatgtaaaaaatctcaagacatgtatcttgacgaagacacagtgtcttagctctatattcgagacaggagactatctgattggtcactttaatttattgaatgctctgattggtacaaaaaaaaaaaaaaaaaaaaaaaaaaaaaaaaaaaaaaaaaaaaaaaaaaaaaaaaaaaaaa

SEQ ID NO: 10042 - protein, 70 aa, Zea mays
  misc_feature: Ceres CLONE ID no. 1588642
  misc_feature: Ceres CDNA ID no. 25446643
  misc_feature (1)..(70): Pfam Name: REX1 PFAM Desc: REX1 DNA Repair
  misc_feature: Homolog of GI Number: 8778626 NR Desc: F5O11.12
  misc_feature: Homolog of GI Number: 62859795 NR Desc: GTF2H5
  misc_feature: Homolog of GI Number: 56208041 NR Desc: similar to vertebrate TFIIH basal transcription factor complex TTDA subunit
  misc_feature: Homolog of GI Number: 46359855 NR Desc: general transcription factor IIH
MVNAIKGLFISCDVPMAQFIVNLNASMPPSERFIVHMLDPTNMFVQPHVAHMIRSKIGEFRDQNSYEKPQ

SEQ ID NO: 10043 - DNA, 871 bp, Zea mays
  misc_feature: Ceres CLONE ID no. 1588666
  misc_feature: Ceres CDNA ID no. 25446046
  CDS (24)..(485): REFERENCED BY SEQ ID NO: 10044
actagaaaaaaagtgcccgagcgatgcagcagataatcagcgcctgcaagctgcctcacacgcaacgggccgccgcgctcctgccgcagaggccatcgctcaggcgccttccagtcccaggaggtgcgccgccgccgcggcgattggtagtcaggaggagatgccaggaagaggataagcagcagcaagaggccgaggagggaagcggccctgacgagcaggagcaggagcagcagaagcgaacgttcctgagcctggaggaggccgggctggtggagatgtccggcctcagcacgcacgagcgtttcctctgccgcctcaccatatcgtctctgaacctgctgagagtgatctcggagcaggagggcgtcccgatagaggagctcaacgccgggcgcgtctgcgactggttcctcaaggacaagctcaagagagagcagaacgtcggcaccgccgtcttgcagtgggacgaccctggcttctagctagttccagcttcgttctgagccaatgatcatgctattctacactgcagcgcacgcaggggctatatatttcagggcttcaggcccttcacgggatgagcaaccaatgccacattccatttatatatatctttcggtttggtttcatctttacaaattttctgtagcgacgaacatttttcctgtgcggaaaatgggaaaggaatttacgggtaaactgattttgggagatagatcgagtttcttgcaaataaattctgtcagctccaatttatctcctctgatcgttaatccggttattcaatcgaaaccaaagccggttaaagttctctattaccggtacgaataatctgaaggaatattgtactcaaaaaaaaaaaaaaaaa

SEQ ID NO: 10044 - protein, 153 aa, Zea mays
  misc_feature: Ceres CLONE ID no. 1588666
  misc_feature: Ceres CDNA ID no. 25446046
  misc_feature: Homolog of GI Number: 50929005 NR Desc: OSJNBa0043L09.26
MQQIISACKLPHTQRAAALLPQRPSLRRLPVPGGAPPPRRLVVRRRCQEEDKQQQEAEEGSGPDEQEQEQQKRTFLSLEEAGLVEMSGLSTHERFLCRLTISSLNLLRVISEQEGVPIEELNAGRVCDWFLKDKLKREQNVGTAVLQWDDPGF

SEQ ID NO: 10045 - DNA, 632 bp, Zea mays
  misc_feature: Ceres CLONE ID no. 1588681
  misc_feature: Ceres CDNA ID no. 36706272
  CDS (67)..(468): REFERENCED BY SEQ ID NO: 10046
agccgccgctgcttaccgcctatctcgccaagcaccgccgcatcaccgaaggttcgcaaagtgcagatggcggtgccgctgctgacgcagaagatcgtgaagaagagggtcaagcagttcaagaggccccatcttgaccgctacaagtgccttaagccaagctggcgcaggcccaagggtatcgactcccgcgtcaggcgtaagttcaagggatgcaccttgatgcccaacattggatatggctccgacaagaagaccaggcactaccttcccaacaagttcaaaaagtttgttgttcacaatgtctccgagctggagctgctgctgatgcacaacaggacttactgcgctgagattgcccacaacgtgtccacccgcaagcgcaaggagattgtcgagcgtgctgcgcaaatggacatcgtggtcaccaacaagcttgccaggctccgcagccaagaggacgagtgaaatgttgggtagttttgattgtgctctgctggtgttgaagatgttactgagattgatgttcttctgtaccatttctatgcttatgatagacttttcatatggacaaaattatgctatgagtgaaaagagttatggggagtgccatctaaaaaaaaaaaaaaaaa

SEQ ID NO: 10046 - protein, 133 aa, Zea mays; identical to SEQ ID NO: 576
  misc_feature: Ceres CLONE ID no. 1588681
  misc_feature: Ceres CDNA ID no. 36706272
  misc_feature (14)..(123): Pfam Name: Ribosomal_L32e PFAM Desc: Ribosomal protein L32
  misc_feature: Homolog of GI Number: 50947773 NR Desc: putative ribosomal protein L32
  misc_feature: Homolog of GI Number: 76057835 NR Desc: ribosomal L32
  misc_feature: Homolog of GI Number: 71534997 NR Desc: ribosomal protein L32
  misc_feature: Homolog of GI Number: 13899057 NR Desc: ribosomal protein L32
  misc_feature: Homolog of GI Number: 40287540 NR Desc: ly200 protein
  misc_feature: Homolog of GI Number: 77745481 NR Desc: ly200
  misc_feature: Homolog of GI Number: 23198054 NR Desc: ribosomal protein L32
  misc_feature: Homolog of GI Number: 21555143 NR Desc: ribosomal protein L32
  misc_feature: Homolog of GI Number: 10177580 NR Desc: ribosomal protein L32
  misc_feature: Homolog of GI Number: 28200284 NR Desc: ribosomal protein L32

SEQ ID NO: 10047 - DNA, 538 bp, Zea mays
  misc_feature: Ceres CLONE ID no. 1588757
  misc_feature: Ceres CDNA ID no. 40352056
  CDS (67)..(354): REFERENCED BY SEQ ID NO: 10048
agagacgccttcttgctctcgcttccggtgacgcccgccacttcctccccgacgagatgttttgtgatgattttgcagacgaaacgcaccaagaaggcaggaatcgttggcaaatatggtaccaggtatggtgccagtttacgtaaacagatcaagaagatggaggtctcgcagcactccaaatacttctgtgagttctgtggcaagtttgccgtgaagaggaaagcagttggtatctggggatgcaaggactgtgggaaggttaaggccggtggcgcctacacaatgaacactgctagtgcggtcactgtgagaagcacaatccggcgcctgcgggagcagaccgaagcatgattgcgggcagcttgaaaaggagtacctggatttttgtagttcagccaagagccgtgaaccattttgcctttttagctaaatgaacaagaaatgtttatctatctgtagtgaccactttgtactcatggtttgtcatgctaaattgatggtatgcactatgcaatgctaaaaaaaaaaaaaaaaa

SEQ ID NO: 10048 - protein, 95 aa, Zea mays
  misc_feature: Ceres CLONE ID no. 1588757
  misc_feature: Ceres CDNA ID no. 40352056
  misc_feature: null
  misc_feature: Useful for making plants with modulated cold sensitivity
  misc_feature (5)..(94): Pfam Name: Ribosomal_L37ae PFAM Desc: Ribosomal L37ae protein family
MILQTKRTKKAGIVGKYGTRYGASLRKQIKKMEVSQHSKYFCEFCGKFAVKRKAVGIWGCKDCGKVKAGGAYTMNTASAVTVRSTIRRLREQTEA

SEQ ID NO: 10049 - DNA, 593 bp, Zea mays
  misc_feature: Ceres CLONE ID no. 1589201
  misc_feature: Ceres CDNA ID no. 36707131
  CDS (2)..(490): REFERENCED BY SEQ ID NO: 10050
aagtaatttcttcatctggtggtcttcttgttcaatccccatctcgatcggggaggccaccaaccaccatatggcgggagggaaggtttactcgttcgaggaggtgaggaagcacagcgaccgcaaggactgctggctcatcatcgccggcaaggtgtacgacgtcacgccgttcatggaggagcaccccggcggcgacgaggtcctgctggcgtccgtcggcaaggacgccaccgcggacttcgaggacatcggccacagcgcctccgccaaggagctcatgccccagtactgcatcggcaaggtcgacgcggctaccttcccggccaagcccgcctacgtcgtcaccaaggacgacgccaggtcgtccgagaaggccgcgacgagcgccggcgcttgggccacgctcctgcagctcgccgcgcccgtcctgctgctggcgctggccttcgcgctgcagcagaactatgccagggccaaggcggagtagacaagatacagatagataccatcgttgattccgctgagtcgcggccgtgcggcctctttggaagcatctgaattacattttcttcctgccaaaaaaaaaaaaa

SEQ ID NO: 10050 - protein, 139 aa, Zea mays
  misc_feature: Ceres CLONE ID no. 1589201
  misc_feature: Ceres CDNA ID no. 36707131
  misc_feature (6)..(80): Pfam Name: Cyt PFAM Desc: Cytochrome b5
  misc_feature: Homolog of GI Number: 50911308 NR Desc: putative cytochrome b5
  misc_feature: Homolog of GI Number: 25044825 NR Desc: cytochrome b5
  misc_feature: Homolog of GI Number: 37536104 NR Desc: putative cytochrome
  misc_feature: Homolog of GI Number: 21281008 NR Desc: putative cytochrome b5 protein
  misc_feature: Homolog of GI Number: 50844673 NR Desc: cytochrome b5 isoform Cb5
  misc_feature: Homolog of GI Number: 729252 NR Desc: Cytochrome b5
  misc_feature: Homolog of GI Number: 2695711 NR Desc: cytochome b5
  misc_feature: Homolog of GI Number: 17104717 NR Desc: putative cytochrome b5 protein
  misc_feature: Homolog of GI Number: 50844677 NR Desc: cytochrome b5 isoform Cb5
  misc_feature: Homolog of GI Number: 50844675 NR Desc: cytochrome b5 isoform Cb5
MAGGKVYSFEEVRKHSDRKDCWLIIAGKVYDVTPFMEEHPGGDEVLLASVGKDATADFEDIGHSASAKELMPQYCIGKVDAATFPAKPAYVVTKDDARSSEKAATSAGAWATLLQLAAPVLLLALAFALQQNYARAKAE

SEQ ID NO: 10051 - DNA, 635 bp, Zea mays
  misc_feature: Ceres CLONE ID no. 1589208
  misc_feature: Ceres CDNA ID no. 36706358
  CDS (3)..(506): REFERENCED BY SEQ ID NO: 10052
attccgtcaagtccttcgacttcgtcaaggtcagcctcggctacggcggcaacaagaagctcgacggccgccactcccagcttgagaacctgctactgtgtggttgtcttaaagatcgccttccccatttacagggccagcttatgcagatgaccatgatggttccaccttcgttaccgcgagaacactctctgaacaaggaggacagactgcttcgcttttgctggctggttgtgaagcacagagacgcggtatatggactggagttcgtcaatgaggatggcgggaggaacgagctgagcggtttcagccttgctcatagaaaggatgactacgatactgaacttgcctcggacgatgaagattcggatagcgattcagacacgacgagtatgcggtcgaggaggagaagtagaactgcttggctaggtttctgcagtctcatttgtgttggcagatgcattttctgcagtctcatcgagtacgtgaatttattattattataatatagtagtagcataggatgagagtcagaacctatcaacttgattctaacacacttttgcagtgtcgagcatatgcttgtcattagatgtttaaggcgtgttctgcttctttcaaaaaaaaaaaaaaaa

SEQ ID NO: 10052 - protein, 120 aa, Zea mays
  misc_feature: Ceres CLONE ID no. 1589208
  misc_feature: Ceres CDNA ID no. 36706358
MQMTMMVPPSLPREHSLNKEDRLLRFCWLVVKHRDAVYGLEFVNEDGGRNELSGFSLAHRKDDYDTELASDDEDSDSDSDTTSMRSRRRSRTAWLGFCSLICVGRCIFCSLIEYVNLLLL

SEQ ID NO: 10053 - DNA, 815 bp, Zea mays
  misc_feature: Ceres CLONE ID no. 1589214
  misc_feature: Ceres CDNA ID no. 29191590
  CDS (75)..(611): REFERENCED BY SEQ ID NO: 10054
aaagacggccgccatctcccctgttcggttttaggagacctgcgccgctcctccggccacgcgagcacgccgaaatggtcgcccacaggttccatcagtaccaggtggtgggtcgcgcgctgccgaccccgaccgatgagcaccccaagatctaccgcatgaagctctgggccactaacgaggttcgcgccaagtcgaagttctggtacttcctgagaaagctgaagaaggtgaagaagagcaatggccagatgctcgccatcaacgagatcttcgagcgcaaccctaccaccatcaagaactacggcatctggctgcggtaccagagcaggacggggtaccacaacatgtacaaggagtaccgcgacacgaccctgaacggcgccgtggagcagatgtacaacgagatggcctcgcgccaccgcgtgaggtccccctgcatccagatcatcaagactgcgacggtccacttcaagctgtgcaagagggacaacacgaagcagttccacaactcggcgatcaagttcccgctcgtgtaccgcaaggtgaggccgcccaccaggaagctcaggaccaccttcaaggcgtccaggcccaacctgttcatgtgatgggcctcggcgggcgggctgtcgcgcacctctgttttgtgtcttagtgtccagagagataaaggtttttgcctctgcaagatttgctgccccgtggactgagcaattcgatgattttttggatgatgtattgcaaacccttgacttttgtcctactagttatgagcaggctgctctttacttgctcaaaaaaaaaaaaaaaaa

SEQ ID NO: 10054 - protein, 178 aa, Zea mays
  misc_feature: Ceres CLONE ID no. 1589214
  misc_feature: Ceres CDNA ID no. 29191590
  misc_feature (5)..(178): Pfam Name: Ribosomal_L18ae PFAM Desc: Ribosomal L18ae protein family
  misc_feature: Homolog of GI Number: 50511482 NR Desc: putative 60S ribosomal protein L18a
  misc_feature: Homolog of GI Number: 34909590 NR Desc: putative ribosomal protein L18a
  misc_feature: Homolog of GI Number: 34910926 NR Desc: putative 60S ribosomal protein L18A
  misc_feature: Homolog of GI Number: 13430184 NR Desc: ribosomal protein L18a
  misc_feature: Homolog of GI Number: 30102898 NR Desc: At2g34480
  misc_feature: Homolog of GI Number: 20453309 NR Desc: AT3g14600/MIE1_10
  misc_feature: Homolog of GI Number: 21593925 NR Desc: putative 60S ribosomal protein L18A
  misc_feature: Useful for making ornamental plants with modified flowers
  misc_feature: Useful for making ornamental plants with modified leaves
  misc_feature: Useful for making plants with altered leaf shape eg curled leaves
  misc_feature: Useful for making shorter plants
MVAHRFHQYQVVGRALPTPTDEHPKIYRMKLWATNEVRAKSKFWYFLRKLKKVKKSNGQMLAINEIFERNPTTIKNYGIWLRYQSRTGYHNMYKEYRDTTLNGAVEQMYNEMASRHRVRSPCIQIIKTATVHFKLCKRDNTKQFHNSAIKFPLVYRKVRPPTRKLRTTFKASRPNLFM

SEQ ID NO: 10055 - DNA, 584 bp, Zea mays
  misc_feature: Ceres CLONE ID no. 1589460
  misc_feature: Ceres CDNA ID no. 35383463
  CDS (92)..(451): REFERENCED BY SEQ ID NO: 10056
aatcatcagtcatcacataccaccaagaccacatcggcacatcgacgtgagctcgtgcgtgagtgccctggtcgacgaccgctcgcgcgccatggactcaacgacgacggcgccgctgctgcagccgtccgccgcctcgagcaaggaggggccggggccggcgccggctcagcacggtgagggcagccgggagctggaggcgatcctggccgacgcgtccaagccgtgggcttggcgggcctgggaaggcgcccgcctggagctgccgctgctgctgcgggtggcgctgccggcggtggccgtctacatgatcaacttcgtcatgtccatgtccacgcagatcttctgcggccagctcggcaacctcgagctcgccgcctcctcgctcggcaacaccggcatccagcccttggcctacggcctcatggtgcgtgtcctctgtttcatttagctcacatggtccattcgcctacttgctagttcagagcaaatgattttttttctttgtgttcgtgattattcataagttctgctgttttcatctcaaaaaaaaaaaaaaaaaaaaaaaaaaaaaaaaaaaaaaa

SEQ ID NO: 10056 - protein, 119 aa, Zea mays
  misc_feature: Ceres CLONE ID no. 1589460
  misc_feature: Ceres CDNA ID no. 35383463
  misc_feature: Homolog of GI Number: 50901080 NR Desc: putative MATE efflux family protein
  misc_feature: Homolog of GI Number: 50901110 NR Desc: putative MATE efflux family protein
  misc_feature: Homolog of GI Number: 41393238 NR Desc: putative MatE domain containing protein
  misc_feature: Homolog of GI Number: 20466556 NR Desc: integral membrane protein
  misc_feature: Homolog of GI Number: 34901880 NR Desc: putative ripening regulated protein DDTFR18
  misc_feature: Homolog of GI Number: 42572981 NR Desc: MATE efflux family protein
  misc_feature: Homolog of GI Number: 22137012 NR Desc: At4g21910/T8O5_120
  misc_feature: Homolog of GI Number: 15081773 NR Desc: At1g61890/F8K4_9
MDSTTTAPLLQPSAASSKEGPGPAPAQHGEGSRELEAILADASKPWAWRAWEGARLELPLLLRVALPAVAVYMINFVMSMSTQIFCGQLGNLELAASSLGNTGIQPLAYGLMVRVLCFI

SEQ ID NO: 10057 - DNA, 564 bp, Zea mays
  misc_feature: Ceres CLONE ID no. 1589484
  misc_feature: Ceres CDNA ID no. 36707145
  CDS (12)..(377): REFERENCED BY SEQ ID NO: 10058
aaccagcgagcatgtcgcctgtcaccgcactcctggcgggcacggtggtgccgccggcctcggccccgtcgccagcgaggcacgcccgccattactccgtcggcttctccccgctccacggcggcgggcgcgcggcgctggcggtggagtgctcgtcgcggccgcagaagaaggggaccaagcaccacatgaagacgcggcccaagaagacgcagccgtgggacatcaagcgccgccccacgcagtacccgccgctgccgccgctcccgccggactggacgctcgtcgcctccggcgccacggtggacgtggaggaggcggaggccccggcacccgccgcgactctcgtcctcgacgtggccgcggccaccgactgaggccgccgcggcgtgtcgccaaagttgttcccttgaacctccgcataagctgtttttctttgagatttattatataataacaatggctgcccagattttgtgattataaattaagaatctttcattgctgtccaaaaaaaaaaaaaaaaaaaaaaaaaaaaaaaaaaaagaaaaaaaaaaaaaaaaa

SEQ ID NO: 10058 - protein, 121 aa, Zea mays
  misc_feature: Ceres CLONE ID no. 1589484
  misc_feature: Ceres CDNA ID no. 36707145
  misc_feature: Homolog of GI Number: 77551395 NR Desc: plastid
  misc_feature: Homolog of GI Number: 7578927 NR Desc: plastid
  misc_feature: Homolog of GI Number: 67987177 NR Desc: 4Fe
MSPVTALLAGTVVPPASAPSPARHARHYSVGFSPLHGGGRAALAVECSSRPQKKGTKHHMKTRPKKTQPWDIKRRPTQYPPLPPLPPDWTLVASGATVDVEEAEAPAPAATLVLDVAAATD

SEQ ID NO: 10059 - DNA, 688 bp, Zea mays
  misc_feature: Ceres CLONE ID no. 1589496
  misc_feature: Ceres CDNA ID no. 25446644
  CDS (3)..(377): REFERENCED BY SEQ ID NO: 10060
acaccgttacatatctccatctcacccgcgcgcccacgcgcctccaccacgccatcgacgacccgctgacgacgggtcccacgcgcgccgcgggcacggaggtgggccgcgcccagggcacctacacgttcgcggaccagcagacgttcgggctcctcatggtcatgaacttcgtgttcacggccggcgagcacaacggcagcacgctctccatccttggccgcaacgaggtgctcagcgacgtccgcgagatgagcatcgtcggcggcagcggcaagttccgcatggcgcgcgggtacgtgcaggcacacaccatcgactccggcgccacctccgggaccaccgtcgtccagtacaccgtcaacgtcaaggcctagctacctattacgtacccttgcttgcgactccgggccgtggtttctcgtacgtccatccacatctccggctgctttgtacacaccttgtctgtcgtctttgaggccttgtttgggtaagaagggattgaagtggattaaagtgtattttagggattgaaagggaaattagttcatattacacttcaatacaccttataccacctcaatccactccaatccaagattacccaaacatgccctgagcgggattcggatctgcagagccgaattagtactaaaaaaaaaaaaaaaaaaaaaaaaaaaaaaaaaaa

SEQ ID NO: 10060 - protein, 72 aa, Zea mays
  misc_feature: Ceres CLONE ID no. 1589496
  misc_feature: Ceres CDNA ID no. 25446644
  misc_feature (1)..(72): Pfam Name: Dirigent PFAM Desc: Dirigent
  misc_feature: Homolog of GI Number: 62734201 NR Desc: At3g13650
  misc_feature: Homolog of GI Number: 6227011 NR Desc: F12P19.3
  misc_feature: Homolog of GI Number: 62734203 NR Desc: Similar to F12P19.3
  misc_feature: Homolog of GI Number: 62734190 NR Desc: F12P19.3
  misc_feature: Homolog of GI Number: 71040679 NR Desc: disease resistance
  misc_feature: Homolog of GI Number: 37201988 NR Desc: At3g13650
  misc_feature: Homolog of GI Number: 51971026 NR Desc: putative disease resistance response protein
  misc_feature: Homolog of GI Number: 62734184 NR Desc: At5g42500
  misc_feature: Homolog of GI Number: 77550725 NR Desc: Dirigent
  misc_feature: Homolog of GI Number: 62734181 NR Desc: At5g42500
MVMNFVFTAGEHNGSTLSILGRNEVLSDVREMSIVGGSGKFRMARGYVQAHTIDSGATSGTTVVQYTVNVKA

SEQ ID NO: 10061 - DNA, 722 bp, Zea mays
  misc_feature: Ceres CLONE ID no. 1589571
  misc_feature: Ceres CDNA ID no. 25446569
  CDS (3)..(542): REFERENCED BY SEQ ID NO: 10062
aacgcacgtcgcctagcctcgctcgctcccagccgcacgctagcagccagctcgcatgcgcccacgtcgcgcagacgcgcgatcgcccaggcgccccgcccagccgctgcgacctaggtcccaccaacctggccgcccctccatggctcatcttccccaaccgctccctccgctttgtacacacgcagaactgctcgcctagcagccctctcgctcgtctcgccgtcgcgccggctgctgtacgcgtcggagccgccgacgctgtcaagcttcgccgcctcgcccgaagcagccttgccccaccgtgtcgcgccatcgcctcgtccttcgtcgccaagtctgcaatccattttcgagcttcgaggaatcgacagtcaagctttggcgaccaagtgattgaactctccgagttatacgagaatgaataccctgagcatctgtttggtgaaggttgcctttggtgcaatctatgctcaggtaaagaagaaggcgtcgaggcgaatctccaggagttccaggacttcgacgagttcgaggattaggctagcgacctcccccagtcagctgcctgtggtgggtttatttacgttggccacgtttctgttctgtgtactttgattatattatgtaaatggctctagtctgtaatattattacttactttttattgttattcgaagcattgtgctatgatgagtcatttatgcaaaaaaaaaaaaaaa

SEQ ID NO: 10062 - protein, 65 aa, Zea mays
  misc_feature: Ceres CLONE ID no. 1589571
  misc_feature: Ceres CDNA ID no. 25446569
MNTLSICLVKVAFGAIYAQVKKKASRRISRSSRTSTSSRIRLATSPSQLPVVGLFTLATFLFCVL

SEQ ID NO: 10063 - DNA, 777 bp, Zea mays
  misc_feature: Ceres CLONE ID no. 1589572
  misc_feature: Ceres CDNA ID no. 25447497
  CDS (196)..(600): REFERENCED BY SEQ ID NO: 10064
aatttttttttttttttcatgcgttccttatcttccgttccgctcggaagtctctctaccaccttctccccattccgctgttccgccctctcgcgtcgcgtgcctccaggtccctcctctgcgtaactgggtggccgccgatccgccgccaccgccctgcgtcaggtgttccggtgacaagcgtccacctgcaagatgttggaataccaaaacgcaattggggggagactgaagctgaagggtaaagcgctggacgtaaaggatggtggggtgaagaaaaagaagaagaagtaccagcgtgaggagtcgtctcagattgcgcacgatgagctccacaaaggggggagatctgaatcaccaattgatcccaacaatgagcggattgaatctgacaagaccggagatgaagggaacccacatcctgactatggccatctcacaccagcagagcgacgctacatggaacagaagcagaagatcgacatgcagaagatggccaaagtcgccaacaagtcccatagagaccgcatccaagacttcaatcagtacctggcaaacctaagcgagcactacgacatccccaaagttggtcctggctaacatagccaaactggctgtgttacgcacaacaattgtgtgctgggtctatccatttatgttagcatgttatgtatcgtttaaaacgatttgttgccaccagaaattgatatttaatttcaaaagcatgttccaactaaaaaaaaaaaaaaaaaaaaaaaaaaaaaaaaaaaaaaaaaa

SEQ ID NO: 10064 - protein, 134 aa, Zea mays; identical to SEQ ID NO: 262
  misc_feature: Ceres CLONE ID no. 1589572
  misc_feature: Ceres CDNA ID no. 25447497
  misc_feature: Homolog of GI Number: 50912351 NR Desc: CGI
  misc_feature: Homolog of GI Number: 20269115 NR Desc: CGI
  misc_feature: Homolog of GI Number: 50761174 NR Desc:  similar to family with sequence similarity 32
  misc_feature: Homolog of GI Number: 51762906 NR Desc: similar to RIKEN cDNA 2510049I19
  misc_feature: Homolog of GI Number: 61873558 NR Desc:  similar to family with sequence similarity 32
  misc_feature: Useful for making ornamental plants with modified leaves

SEQ ID NO: 10065 - DNA, 724 bp, Zea mays
  misc_feature: Ceres CLONE ID no. 1589604
  misc_feature: Ceres CDNA ID no. 25447083
  CDS (67)..(603): REFERENCED BY SEQ ID NO: 10066
actccacccgtcgccgcttcctcccgttagactaggttaggctagggtgtcgaccagctcgcggaaatggtggccttcaggttccatcagtaccaggtggtggggcgcgcgctgccgacgcccggcgacgagcaccccaagatctaccgcatgaagctctgggccaccaacgaagtccgcgccaagagcaagttctggtacttcctgaggaagttgaagaaggttaagaagagcaacggtcaggtcctggccatcaacgagatcttcgagcgtaacccgacgacgatcaagaactacggcatctggctgcgctaccagagcagaaccggctaccacaacatgtacaaggagtaccgcgacacaaccctgaacggcgctgtagaacagatgtacaatgagatggcttctcgccaccgcgtgaggtccccctgcatccagatcatcaagaccgccacggtgcacttcaagctgtgcaagagggacaacacaaagcagttccacaacagtgagatcaagttcccactcgtgtaccgcaaggtcaggccgccgaccaggaagctgaagaccacgttcaaggcttcgaggccgaacctgttcatgtgatttagctgtggtcagtgtatgtgatcgtaagaatctgtgttttaagttttgacgctaagacttgggtggtttgatgattcaactcgttttgaaacgtgcttggggaaaaaaaaaaaaaaaa

SEQ ID NO: 10066 - protein, 178 aa, Zea mays
  misc_feature: Ceres CLONE ID no. 1589604
  misc_feature: Ceres CDNA ID no. 25447083
  misc_feature (5)..(178): Pfam Name: Ribosomal_L18ae PFAM Desc: Ribosomal L18ae protein family
  misc_feature: Homolog of GI Number: 50511482 NR Desc: putative 60S ribosomal protein L18a
  misc_feature: Homolog of GI Number: 34909590 NR Desc: putative ribosomal protein L18a
  misc_feature: Homolog of GI Number: 34910926 NR Desc: putative 60S ribosomal protein L18A
  misc_feature: Homolog of GI Number: 30102898 NR Desc: At2g34480
  misc_feature: Homolog of GI Number: 13430184 NR Desc: ribosomal protein L18a
  misc_feature: Homolog of GI Number: 20453309 NR Desc: AT3g14600/MIE1_10
  misc_feature: Homolog of GI Number: 21593925 NR Desc: putative 60S ribosomal protein L18A
  misc_feature: Useful for making ornamental plants with modified flowers
  misc_feature: Useful for making ornamental plants with modified leaves
  misc_feature: Useful for making plants with altered leaf shape eg curled leaves
  misc_feature: Useful for making shorter plants
MVAFRFHQYQVVGRALPTPGDEHPKIYRMKLWATNEVRAKSKFWYFLRKLKKVKKSNGQVLAINEIFERNPTTIKNYGIWLRYQSRTGYHNMYKEYRDTTLNGAVEQMYNEMASRHRVRSPCIQIIKTATVHFKLCKRDNTKQFHNSEIKFPLVYRKVRPPTRKLKTTFKASRPNLFM

SEQ ID NO: 10067 - DNA, 813 bp, Zea mays
  misc_feature: Ceres CLONE ID no. 1589785
  misc_feature: Ceres CDNA ID no. 40352057
  CDS (216)..(611): REFERENCED BY SEQ ID NO: 10068
aaggtgcccctgtttcggctacagtgcacattgctaaacgctcccgcagtcccgccgtctcgcaagccgccgccgggtccttacgcaagtccgcgacgtgcatcgcctggagaggctcccgtctcgccgccctgcggatctcatctcatctgtgcagccgcgcgtggcccaacggagccagaagcaaagaggacgaaccttattcttcaggtgatatgtcgtctgaggagggtgcgcaggtcacttgtttcacagaggatcttcacgatgtaacacttcactttcagatagtgaggttttctaaacagatatacgtgtgggttggatgcaacacagcaaagtttggccatttatatgctgctgcaaccactagaccggataacagagtgagtgttacctctgtactaggaggaacatctgataacaccggatcaagtatggctcgccgtctagtgctgaagaccggcctgaacatagtcctggcatgcaacatcccaaaggacagccccatacttgaggctgctgcggagaggaagctggttgagaagctgaaaggtttgggctacattaaaaccccagctgtggaggctaacacttcctcggcacaatgatccgtggtgtgatctagtgagctttcggtcgacgtgtagcttcatcactacatgcagcagagagcggttgtgatttttcgcgggctttgactgtgctacctgttctctcatgtggcaaaggttattgtgaacatgttcgttgtgatgtactccgtcctaaaataaacccccttcgtatttcaaggaaaaaaaaaaaaaaaaa

SEQ ID NO: 10068 - protein, 131 aa, Zea mays
  misc_feature: Ceres CLONE ID no. 1589785
  misc_feature: Ceres CDNA ID no. 40352057
MSSEEGAQVTCFTEDLHDVTLHFQIVRFSKQIYVWVGCNTAKFGHLYAAATTRPDNRVSVTSVLGGTSDNTGSSMARRLVLKTGLNIVLACNIPKDSPILEAAAERKLVEKLKGLGYIKTPAVEANTSSAQ

SEQ ID NO: 10069 - DNA, 774 bp, Zea mays
  misc_feature: Ceres CLONE ID no. 1589815
  misc_feature: Ceres CDNA ID no. 25445936
  CDS (48)..(506): REFERENCED BY SEQ ID NO: 10070
aatcttctctccccagattcactcaccgtccgtccgtccagggagccatggcagcagcctgcatctgtctgcagctctctctcccaagcaaccattcttcctctgcatgtcctccagcatacaggaagcgtgtcgcgctagccccagggagaggaaaccgtcttctctgcactgcatctggcgcctcttcttctgtggtggtgaccaaggagcaggaggaaggatctcctgagcccgaaatctttagctacaaagacgaccccaacttcaggggctgcaagggctgcggcagggacgagcttcagaggggctgcaatggacaaggccggatccagggcggcatagccgccgtcccgggcttcggctggtggcccatcaaggcgtaccggccgtgccccggcttcgtcgcgtccggcggccgctaccggcgccagggccaaagcatggacgacgttgcatccggcagggggaaaaagaaaccctctcccgccaaaaaacaagcttaacccctctagctagtttatgttcatcaggtgaattcagaatctacccaaggtgggagggaactggccgggggaagctcaagttattcaggaacagcagtatttttttttggtccacaatgccaatgtatatgcactagttgggagtaccttttgcagaaacaacaattgtatcagtagcctggaacatctgactgtaccctaattgtattattgtcttcatcaagtggcgaatgcaggatcttgcactggtataaaaaaaaaaaaaaaa

SEQ ID NO: 10070 - protein, 152 aa, Zea mays
  misc_feature: Ceres CLONE ID no. 1589815
  misc_feature: Ceres CDNA ID no. 25445936
MAAACICLQLSLPSNHSSSACPPAYRKRVALAPGRGNRLLCTASGASSSVVVTKEQEEGSPEPEIFSYKDDPNFRGCKGCGRDELQRGCNGQGRIQGGIAAVPGFGWWPIKAYRPCPGFVASGGRYRRQGQSMDDVASGRGKKKPSPAKKQA

SEQ ID NO: 10071 - DNA, 539 bp, Zea mays
  misc_feature: Ceres CLONE ID no. 1589986
  misc_feature: Ceres CDNA ID no. 35383464
  CDS (17)..(379): REFERENCED BY SEQ ID NO: 10072
aaggaggccaggacccatggccgtcaccgccgtcgcggcgtctatgtccgtggcgcaggggctcgggaagcccctctgcgccggcagcaacgcgacgtcgctccggggcgtcgcgctcgcgccccgtcgttcggcggcccggatggccgtcgtccgggcgtcgtccgcgcatcaggagcagcacccggccaaggagtgggcggccgcggcggccgtggcggcggcgctggtgctgccggaggtcgcggaggccgcgcccgggatctcgccgtcgctcaagaacttcctcctcagcatcgtctccggaggcgtcgtgctcgtcgccatcgtcggcgccgtcgtcgctgtctctaacttcgatcccgtcaagcggcgctgagctcaagcaactacacgtgcacacatgcatgcagcgttgtatgttgcatgctgtacgccgcctgtacctatgtactacttcccaatgtaaacagcgtttaatctgtgaatcttttgccgtgtaaatgcgatttgcgtgatctcaaaaaaaaaaaaaaaaa

SEQ ID NO: 10072 - protein, 120 aa, Zea mays
  misc_feature: Ceres CLONE ID no. 1589986
  misc_feature: Ceres CDNA ID no. 35383464
  misc_feature (83)..(120): Pfam Name: PsbX PFAM Desc: Photosystem II reaction centre X protein
  misc_feature: Homolog of GI Number: 50939905 NR Desc: putative ultraviolet
  misc_feature: Homolog of GI Number: 45356861 NR Desc: ultraviolet
  misc_feature: Homolog of GI Number: 33520421 NR Desc: ultraviolet
  misc_feature: Homolog of GI Number: 18476498 NR Desc: ultraviolet
  misc_feature: Homolog of GI Number: 67988031 NR Desc: ROK
MAVTAVAASMSVAQGLGKPLCAGSNATSLRGVALAPRRSAARMAVVRASSAHQEQHPAKEWAAAAAVAAALVLPEVAEAAPGISPSLKNFLLSIVSGGVVLVAIVGAVVAVSNFDPVKRR

SEQ ID NO: 10073 - DNA, 557 bp, Zea mays
  misc_feature: Ceres CLONE ID no. 1590008
  misc_feature: Ceres CDNA ID no. 25447084
  CDS (3)..(239): REFERENCED BY SEQ ID NO: 10074
aaaaaaaaaaaaaaaaaaaacgtccgcatcgcgtggaacatttccacgcgaaggcgaggggagggcgacgcgtgcggctagcgaggcgatggttgcgcgacacgctgacggcgacgcctgcgaccatcgatcatccattgttcatctccatccccttcggtggccaattttctctccggtctaatatgcattttgggcttcttttgagtcatgttgttggtgtggaaccgtggaagtaggatgtggactgcaaggatggctagtttactctttactggcattgacagtttacttgtcgttcttcagtcatttggtggcatgtatcatcaagcttctgtcctttctatacattgttatgaacgttgctatgccttttatttcgaatgctgatgcaatctacgagtttctatccttgtatgtgtgcatagacattgttatgaatgctgctaatgtcttttattttgaatgcttatgcaatctattgagttgtatgtgtgtaaagacattgttatgtgtacggttttctatgtcatattcttttgaaaaaaaaaaaaaaa

SEQ ID NO: 10074 - protein, 59 aa, Zea mays
  misc_feature: Ceres CLONE ID no. 1590008
  misc_feature: Ceres CDNA ID no. 25447084
MLLVWNRGSRMWTARMASLLFTGIDSLLVVLQSFGGMYHQASVLSIHCYERCYAFYFEC

SEQ ID NO: 10075 - DNA, 580 bp, Zea mays
  misc_feature: Ceres CLONE ID no. 1590067
  misc_feature: Ceres CDNA ID no. 25447498
  CDS (81)..(365): REFERENCED BY SEQ ID NO: 10076
agccccacgccgtcactcctctcaacccgaccacgccgcgcctccgcttcgaaccctagccgagcggggtaaggagggaaatggggaagggtacgggcagcttcggcaagcgccggaacaaaacgcacacgctgtgcatccgctgcggccgccgcagcttccacctccagaagagtacctgctcctcctgcggctaccccgcggcccgcatccgcaagtataattggagtgtgaaggccatcaggcgcaagaccactggtacgggaaggatgaggtacatgcgacacgtgcctcgccgtttcaagagcaacttcagagaagggactgaggctgccccaaagaagagtgctgctgctgccaactaagtgtggatgttgccatcaagaacctcagaagctagacgttggatctttttgattgaattgtacttctgaactatttgcccgtaatactattacagtactggtttaccgtgtcttgaattgaagccagacgccatcttctttgggagcgtgatttatatattaccccagttttatgctaaaaaaaaaaaaaaaaaaaaaaaaaaaaaaaaaaaaaa

SEQ ID NO: 10076 - protein, 94 aa, Zea mays; identical to SEQ ID NO: 5516
  misc_feature: Ceres CLONE ID no. 1590067
  misc_feature: Ceres CDNA ID no. 25447498
  misc_feature (2)..(55): Pfam Name: Ribosomal_L37e PFAM Desc: Ribosomal protein L37e
  misc_feature: Homolog of GI Number: 50904689 NR Desc: putative 60S ribosomal protein L37
  misc_feature: Homolog of GI Number: 50915832 NR Desc: putative ribosomal protein L37
  misc_feature: Homolog of GI Number: 44662866 NR Desc: ribosomal protein L37
  misc_feature: Homolog of GI Number: 21553481 NR Desc: putative ribosomal protein
  misc_feature: Homolog of GI Number: 21537060 NR Desc: putative 60s ribosomal protein L37
  misc_feature: Homolog of GI Number: 21280805 NR Desc: putative 60S ribosomal protein L37
  misc_feature: Homolog of GI Number: 24642107 NR Desc: CG9091
  misc_feature: Homolog of GI Number: 45934571 NR Desc: 60S ribosomal protein L37
  misc_feature: Homolog of GI Number: 38048279 NR Desc: similar to Drosophila melanogaster CG9091
  misc_feature: Homolog of GI Number: 50761594 NR Desc:  similar to ribosomal protein L37

SEQ ID NO: 10077 - DNA, 626 bp, Zea mays
  misc_feature: Ceres CLONE ID no. 1590119
  misc_feature: Ceres CDNA ID no. 25445937
  CDS (124)..(420): REFERENCED BY SEQ ID NO: 10078
aaaaaaaaaaaaaaaacaaaaggcgacgccgctgggatctagcacgcgagcgagcgagagagccgcgcacctatctggcaagcgacgccgcggcctcgatcggagtcggaggcgaacacccccatggcggcggctggcggcggcgcaggagggaaggtatccttcaagatcatcctcacctccgaccccaagctccctttcaaagtgttcagcgtgcccgaggcggcgcccttcaccgcggtgctcaagtacgccgcggaggagttcaaggtcccgccccagaccagtgccatcatcaccaacgatggaattggcatcaacccccagcaaagtgcaggcaacgtgtttctgaaacatggttcggagctgcgtctcatccctcgcgatagagttggagctgtagtcatgtcttccggttagaggatatatacagtccaatgcataatgagcaaaacttgagagaaataaagctttgatgttggccttgcttggctgtaggatgttgttacaaggataataagcgaaccttaccgtacatgtctcaagttgtatgctctctgtttgtatgtggagagatttctgaaagtgaatccagtatctgaatcgactaaaaaaaaaaaaaaaaa

SEQ ID NO: 10078 - protein, 98 aa, Zea mays
  misc_feature: Ceres CLONE ID no. 1590119
  misc_feature: Ceres CDNA ID no. 25445937
  misc_feature (10)..(85): Pfam Name: UPF0185 PFAM Desc: Uncharacterised protein family
  misc_feature: Homolog of GI Number: 34905822 NR Desc: P0483G10.15
  misc_feature: Homolog of GI Number: 56112391 NR Desc: PR46a
  misc_feature: Homolog of GI Number: 58396265 NR Desc: ENSANGP00000017552
  misc_feature: Homolog of GI Number: 57104840 NR Desc:  similar to RIKEN cDNA 1810045K17
  misc_feature: Homolog of GI Number: 72005426 NR Desc:  similar to human bone marrow protein BM (9.8 kD) (3I949)
  misc_feature: Homolog of GI Number: 40889046 NR Desc: Chain A Kda Protein
MAAAGGGAGGKVSFKIILTSDPKLPFKVFSVPEAAPFTAVLKYAAEEFKVPPQTSAIITNDGIGINPQQSAGNVFLKHGSELRLIPRDRVGAVVMSSG

SEQ ID NO: 10079 - DNA, 878 bp, Zea mays
  misc_feature: Ceres CLONE ID no. 1590194
  misc_feature: Ceres CDNA ID no. 25446570
  CDS (100)..(573): REFERENCED BY SEQ ID NO: 10080
aaaaaaaaaaaaaaaaaaaagatcttcctccgccgtctcctcctgtcacccgcttgctttgaatccctttcttctgccccgccatcgcgacgcgccgacatgactgggtcttctaagaagcatgacctcaaatctaagcaaaaattggaaaagaagattagtttttacacaaaagtaaaagatgcagttacttccttaaatgctaagaagactgtcagtaagaaaaataaacagagtcggcgccagaagaagcttaaagcatacgatctgtcggcactttctgagttcctcccagaaccagctgcaccagagcagaagactgaagcaaagctgaactgcaagtcaagacagacattagtggtgcaggagtctgctcatcttaaggctgtactggacaacccgcagttccagcttgacccattcgctgcgatccatcagcacctgctggcaacgcagccgcctgcagctgcaaagaaggacgacgcagcggggaagcaggggaaggtttccaaggacaagaaaagcaggaggaagaagggcacatcgtcaatctctcaggcaatggatatctgattgtgttccttcagtactagtaacttggtccgatgtcgactgcccgtgttccactagagggagctcatcgaagttcgatatcgatggttggcatagtttgagtaccagtagaggtagtactgtaccagccctcgcttttggcagcctgttgattgatgtttgcagaatcggtgccatcaacatttggtgctactttggaaactggggatttgaggagaggattgagggagaaaatgaacttgaggggattgagagggtcaatcctacatgaggtggcaatttccaagcacaacaaaaaaaaaaaa

SEQ ID NO: 10080 - protein, 157 aa, Zea mays
  misc_feature: Ceres CLONE ID no. 1590194
  misc_feature: Ceres CDNA ID no. 25446570
MTGSSKKHDLKSKQKLEKKISFYTKVKDAVTSLNAKKTVSKKNKQSRRQKKLKAYDLSALSEFLPEPAAPEQKTEAKLNCKSRQTLVVQESAHLKAVLDNPQFQLDPFAAIHQHLLATQPPAAAKKDDAAGKQGKVSKDKKSRRKKGTSSISQAMDI

SEQ ID NO: 10081 - DNA, 771 bp, Zea mays
  misc_feature: Ceres CLONE ID no. 1590683
  misc_feature: Ceres CDNA ID no. 25446571
  CDS (100)..(615): REFERENCED BY SEQ ID NO: 10082
agtggcagctcgcatttggcacaccaccctctcgtctcggctcgtacgtcccagtgctagctagctgtgaagtgtaggcgacggcggcagcagcaggtaatggcgatggcaccggcagcagcaacccgagctatcggtggctcgggccctagccacttcatctccaatagtagtttcttgtcgccgcctcggccacctcccgttcgtctgccacgtcgcgccggcgggcgcagggccgtgctccttggcgctgggcggcgcaacggatggggcgccgacggcggctcttcttcctcctccgaggacggccggctggtggacgaggacatggcgacgctgcggcggcgtatccgcgaggcgcgggcggagtcgtcagaggaggacggcattttcgacgctgacgacggcggcatcccgctgccgaccgggtggacggagctggagcggcaccaccacgggagctacgtggtcggcgtgcgcggcgcggtcggccttctcgaggcgctcctcgtgaacgcgcgcccggggctcggcgccggcttgctggcggtgctgctgctcggcgtcccggcgtcgctgttcctcgtgtgcgcgcagctgatccggggccgctgattcagtctggtcctgaatgaacgggcgctgctactgcgtcgtcgtcggtgtatagccacatgaagctgtaggtctgccgagcacaattcggcgcagagatcgaacttgtctaaattattggttgcacgtataaactatttcgaaaaaaaaaaaaaa

SEQ ID NO: 10082 - protein, 171 aa, Zea mays
  misc_feature: Ceres CLONE ID no. 1590683
  misc_feature: Ceres CDNA ID no. 25446571
MAMAPAAATRAIGGSGPSHFISNSSFLSPPRPPPVRLPRRAGGRRAVLLGAGRRNGWGADGGSSSSSEDGRLVDEDMATLRRRIREARAESSEEDGIFDADDGGIPLPTGWTELERHHHGSYVVGVRGAVGLLEALLVNARPGLGAGLLAVLLLGVPASLFLVCAQLIRGR

SEQ ID NO: 10083 - DNA, 654 bp, Zea mays
  misc_feature: Ceres CLONE ID no. 1590825
  misc_feature: Ceres CDNA ID no. 36707439
  CDS (134)..(505): REFERENCED BY SEQ ID NO: 10084
aagtagggctgcataagtcccgtgggctcattgcgtgttcgatcgatcggatccccatacgatctactagctagctaagctacacgactcgaccgaggaggaggagcgctcaggccgtatagaaacttggagcatgtcgttaaccacccaagtgtttgggcctcccggctacaggcggtggtggatctattacatcgtcaacgatactgatcaattgagtaaagctctgaaccgacctgatcacctggtggtgttcatgttctcggcggagtggaacgaaccctgcaaggcgatgaagaaaccgttcagggacatggccagggctagaaagatgcaggccgtattctgcttggtggacatcgacaagcttaaagatgctgtggcgcagcagttccaagtggaggcgctgccgacgttcgtgctgtacaagaacggcatacagaaggagagggtcgttggcgccaaggtggacgacctcagagccgccatcgacaggaacatatgattccatctccgatcgatcgatccattcatgctgcatgcatatacggtcgactaataacaacatgaggctagcaaaagacgacggacgatcggatcgtccaacaataaacaaataacattattattaatcttcgaaaaaaaaaaaaaaaa

SEQ ID NO: 10084 - protein, 123 aa, Zea mays
  misc_feature: Ceres CLONE ID no. 1590825
  misc_feature: Ceres CDNA ID no. 36707439
  misc_feature (68)..(122): Pfam Name: Thioredoxin PFAM Desc: Thioredoxin
  misc_feature: Homolog of GI Number: 34897150 NR Desc: putative thioredoxin
  misc_feature: Homolog of GI Number: 1403711 NR Desc: thioredoxin
  misc_feature: Homolog of GI Number: 50932277 NR Desc: putative thioredoxin H
  misc_feature: Homolog of GI Number: 12082335 NR Desc: thioredoxin h
  misc_feature: Homolog of GI Number: 66096352 NR Desc: thioredoxin H
  misc_feature: Homolog of GI Number: 32186042 NR Desc: thioredoxin h isoform 2
  misc_feature: Homolog of GI Number: 30575686 NR Desc: thioredoxin H
  misc_feature: Homolog of GI Number: 66841002 NR Desc: thioredoxin h1 protein
  misc_feature: Homolog of GI Number: 21537330 NR Desc: thioredoxin
  misc_feature: Homolog of GI Number: 1388082 NR Desc: thioredoxin h
MSLTTQVFGPPGYRRWWIYYIVNDTDQLSKALNRPDHLVVFMFSAEWNEPCKAMKKPFRDMARARKMQAVFCLVDIDKLKDAVAQQFQVEALPTFVLYKNGIQKERVVGAKVDDLRAAIDRNI

SEQ ID NO: 10085 - DNA, 579 bp, Zea mays
  misc_feature: Ceres CLONE ID no. 1590835
  misc_feature: Ceres CDNA ID no. 40352058
  CDS (42)..(314): REFERENCED BY SEQ ID NO: 10086
aatccctacggagggccagtcgacctctctgctcgcgaaaaatggcggcggcagcggaaggtttggctgcctacagggcggtgctgcgggcggcgcggcggacgttcgcgggcgaccagctgatgctgaaggagtctgcggtggagatccggcgccgctttgaggaccaccgtggtctaaccccgggctccgacgatgcagcgcgtgccctcgccgacgcccgcgaggcggcgcacttcatcacccatatgatagtccaggccacacgcgcaccctccggatccttcgttctgctttgcagttgtgaagcctgagagtgttcatgctggagctacactggaagttccttccgaggagatcctttcaaagttgaagtaggtcactagcattgctgaagtaggtcaccatctgcatgctagtaaaataagaccagtttgcaacggttgattcttgtgttgcatactggttcacttagtagcttcacacttttgcttttattattattattattattattattattattattattattattattattattattattattattattaaaaaaaaaaaaaaaaa

SEQ ID NO: 10086 - protein, 90 aa, Zea mays
  misc_feature: Ceres CLONE ID no. 1590835
  misc_feature: Ceres CDNA ID no. 40352058
  misc_feature (2)..(69): Pfam Name: Complex1_LYR PFAM Desc: Complex 1 protein
MAAAAEGLAAYRAVLRAARRTFAGDQLMLKESAVEIRRRFEDHRGLTPGSDDAARALADAREAAHFITHMIVQATRAPSGSFVLLCSCEA

SEQ ID NO: 10087 - DNA, 917 bp, Zea mays
  misc_feature: Ceres CLONE ID no. 1590868
  misc_feature: Ceres CDNA ID no. 25446572
  CDS (125)..(643): REFERENCED BY SEQ ID NO: 10088
aacgtattcgttccttgccgcatgcagatcgatggacggccttagctcccactatactactccatatatattgcccctgctccttcctcacgagctagctcaccggccgctcccctagtccagcatgtacagctactatctgtactgggaggggaagtggtattggtggtcgtcggggtactggagcgaacctaacgatagcagacgttacccagcagttaatatagttatattaactaatgcctccttcaactatgcgttgggcatgggagcattagccgaaccacctcaggacagctctgccgacggtgtgatcttgatcaaggatatggcggagtggcaaaagcactgggaccagactgctccatacaacaagctgctggtgtatgagttctacgaaaagaattcctcgctgtgcaaggccatggacaagccgttcgagaagctcgccacgcagtacaaaggcagggccgacttctgcaagctggacgtggacaactttgagcttttggcgcggatttgcggagtggaaggagcgtatccgacgttcgtgctgttcaagaaatgcgcgcaggtgggcaaggtcgttggcctcaaggaggacgacctcgagcggatcgtccagcgagcgataataagctagctaggagtagtcgtcaactcgtcatgtagtaccacacagactcagttttcgtacgtgtgccaagacaaaactacaaaaggacatgactatgcgtacgcatcgatcgatgggcacagcggcggatctacaccccgggccatgtggtccgtggcctggggctgatacatatacctctatataagtctctatttaatacggtataaaatagttaagataaaatgaagatgagaaaatttggtagatttagtccgggtcataaaaaaaaaaaaaaaaa

SEQ ID NO: 10088 - protein, 172 aa, Zea mays
  misc_feature: Ceres CLONE ID no. 1590868
  misc_feature: Ceres CDNA ID no. 25446572
  misc_feature (105)..(163): Pfam Name: Thioredoxin PFAM Desc: Thioredoxin
  misc_feature: Homolog of GI Number: 53748519 NR Desc: thioredoxin 3
  misc_feature: Homolog of GI Number: 33621080 NR Desc: thioredoxin H2
  misc_feature: Homolog of GI Number: 46326970 NR Desc: thioredoxin
  misc_feature: Homolog of GI Number: 66096352 NR Desc: thioredoxin H
  misc_feature: Homolog of GI Number: 1388078 NR Desc: thioredoxin h
  misc_feature: Homolog of GI Number: 21595244 NR Desc: thioredoxin
  misc_feature: Homolog of GI Number: 34897150 NR Desc: putative thioredoxin
  misc_feature: Homolog of GI Number: 50934869 NR Desc: putative thioredoxin
  misc_feature: Homolog of GI Number: 21360489 NR Desc: AT5g39950/MYH19_110
  misc_feature: Homolog of GI Number: 28372832 NR Desc: At1g69880
MYSYYLYWEGKWYWWSSGYWSEPNDSRRYPAVNIVILTNASFNYALGMGALAEPPQDSSADGVILIKDMAEWQKHWDQTAPYNKLLVYEFYEKNSSLCKAMDKPFEKLATQYKGRADFCKLDVDNFELLARICGVEGAYPTFVLFKKCAQVGKVVGLKEDDLERIVQRAIIS

SEQ ID NO: 10089 - DNA, 494 bp, Zea mays
  misc_feature: Ceres CLONE ID no. 1591166
  misc_feature: Ceres CDNA ID no. 35383465
  CDS (112)..(303): REFERENCED BY SEQ ID NO: 10090
aataggcgggtaggcgtccgaggcctcgtttgttctcggcttcttgtctccaagggtgctactccgtccgcgcttggtctgctctcgtccttccggaggccgcggcgcaacatggcgaagatcaagccgaaggccttgctcgcgcaaagcaaggtgaagaaggtccccggccaaatcagcgtggccacgattgtcacctacatgatcctcggcgtcctggtcgtgtcctccgtttacgctgcctacaggtactgctgggcagtcacaggagcagcggaggcagtgggcgcccaggggaactgatcccccttccgactgcgtggctgatctcgctgttgttgtatcatccggttggggtaaaatttttggttgttgctgtctagcaaatggggttcatgggacatggataggttgtatgttgatacggttacaccgtagccgatgatatgtatgttgaatttcttcccttttattatcatttgacgaaaaaaaaa

SEQ ID NO: 10090 - protein, 63 aa, Zea mays
  misc_feature: Ceres CLONE ID no. 1591166
  misc_feature: Ceres CDNA ID no. 35383465
  misc_feature: Homolog of GI Number: 50937101 NR Desc: peptidyl
MAKIKPKALLAQSKVKKVPGQISVATIVTYMILGVLVVSSVYAAYRYCWAVTGAAEAVGAQGN

SEQ ID NO: 10091 - DNA, 502 bp, Zea mays
  misc_feature: Ceres CLONE ID no. 1591244
  misc_feature: Ceres CDNA ID no. 35383466
  CDS (112)..(303): REFERENCED BY SEQ ID NO: 10092
aataggcgggtaggcgtccgaggcctcgtttgttctcggcttcttgtctccaagggtgctactccgtccgcgcttggtctgctctcgtccttccggaggccgcggcgcaacatggcgaagatcaagccgaaggccttgctcgcgcaaagcaaggtgaagaaggtccccggccaaatcagcgtggccacgattgtcacctacatgatcctcggcgtcctggtcgtgtcctccgtttacgctgcctacaggtactgctgggcagtcacaggagcagcggaggcagtgggcgcccaggggaactgatcccccttccgactgcgtggctgatctcgctgttgttgtatcatccggttggggtaaaatttttggttgttgctgtctagcaaatggggttcatgggacatggataggttgtatgttgatacggttacaccgtagccgatgatatgtatgttgaatttcttcccttttattatcatttgacgaaaaaaaaataaaaaaa

SEQ ID NO: 10092 - protein, 63 aa, Zea mays; identical to SEQ ID NO: 10090
  misc_feature: Ceres CLONE ID no. 1591244
  misc_feature: Ceres CDNA ID no. 35383466
  misc_feature: Homolog of GI Number: 50937101 NR Desc: peptidyl

SEQ ID NO: 10093 - DNA, 681 bp, Zea mays
  misc_feature: Ceres CLONE ID no. 1591261
  misc_feature: Ceres CDNA ID no. 36707442
  CDS (145)..(387): REFERENCED BY SEQ ID NO: 10094
aatccccctttctgctcctgtgctgcgtccaccagcctcgtcgttaggacgtaaggtaagacacccaggggcgagccagtgagtacagagagtagccttacgtagcgaagctcagagcaagcgagggtacggtcaaggggggtgatggcgctgtctcgacgcatggcggctcccgtcctcgtcctcatgctcctcctcgtcgccacagagctggggacgaccaaggtggcggaggcgaggcactgcctgtcgcagagccaccggttcaagggcctgtgcatgagcagcaacaactgcgccaacgtgtgccagaccgagaacttccccggcggcgagtgtaaggcggagggcgccacgcgcaagtgcttctgcaagaagatatgctagtagtagcctcggctttgctggcacaagcaggtcgtcggcacgcaacgcaattcaagcatcatatcggtcctcctcccgcgttgctgtctactcgaccccgttttctctttcgatcgatttcgttgtttcctgttgctctcttcttttcccgcgaataatatgctccatgggatctcactgttgtactttctgcatccgttggtagtcaggacgatccttcttcccgctgtcacgtgtgattcaaaatggatgtactaatgcaactgttcgttcttccaaaaaaaaaaaaaaaaa

SEQ ID NO: 10094 - protein, 80 aa, Zea mays; identical to SEQ ID NO: 256
  misc_feature: Ceres CLONE ID no. 1591261
  misc_feature: Ceres CDNA ID no. 36707442
  misc_feature (32)..(80): Pfam Name: Gamma PFAM Desc: Gamma
  misc_feature: Homolog of GI Number: 50910773 NR Desc: putative defensin
  misc_feature: Homolog of GI Number: 60729566 NR Desc: defensin 1 precursor
  misc_feature: Homolog of GI Number: 50926554 NR Desc: OSJNBa0019D11.21
  misc_feature: Homolog of GI Number: 24306004 NR Desc: defensin EGAD1
  misc_feature: Homolog of GI Number: 17066707 NR Desc: defensin protein precursor
  misc_feature: Homolog of GI Number: 533692 NR Desc: protease inhibitor
  misc_feature: Homolog of GI Number: 32400845 NR Desc: proteinase inhibitor Rgpi9
  misc_feature: Homolog of GI Number: 16225423 NR Desc: putative gamma
  misc_feature: Homolog of GI Number: 7939581 NR Desc: thionin like protein
  misc_feature: Homolog of GI Number: 61189792 NR Desc: defensin

SEQ ID NO: 10095 - DNA, 806 bp, Zea mays
  misc_feature: Ceres CLONE ID no. 1591322
  misc_feature: Ceres CDNA ID no. 25446573
  CDS (85)..(567): REFERENCED BY SEQ ID NO: 10096
aagcgcaagcagaagctacaatcctaaaaccatctgcttcagctagccccaagtttagtcggccgatcattcactgaagtagtaatggcctccgtcaacagctggaccctcgagatcgcgtcgccggtggctccgcagcgcctgttccgcgccgccgtgatggactggcacaccctggcgcccaaggtcgcctcccacgtcgtcgccagcgcgcagcccgtggagggcgacggcggcgttggcagcgtcaggcagttcaacttcacctcagtcatgccgttcagcttcatgaaggagcgtctcgagttcctggacgcggacaagtgcgagtgcaagaacacgctcatcgagggcggcggcatcggcgtcgccatcgaaacggcgacgtcgcacatcaaggtggagcccgcggccggcggcgggagcgtggtgaaggtcgagtccacttacaagctgctgccgggcgtggaggtgaaggacgagatcgccaaggctaaggagtccgtcaccgccatcttcaagggtgccgaggcctacctcgtcgccaaccccgacgcctacaactaaaccattggactgggatgaacttcatttcccttccggcttgtttggatatacaagggtattgtgtacggagattgggttttctttccccttcttttttgttttcatacaaaataaaataaagctgctctaaagcagcgtgcggtttttggactcgagatggtatgagtatatgtacgtgctgtccttgtgtgattatgtataccgtcatggttttctttgtggcaaaaaaaaaaaaaaaa

SEQ ID NO: 10096 - protein, 160 aa, Zea mays
  misc_feature: Ceres CLONE ID no. 1591322
  misc_feature: Ceres CDNA ID no. 25446573
  misc_feature (2)..(155): Pfam Name: Bet_v_I PFAM Desc: Pathogenesis
  misc_feature: Homolog of GI Number: 58978027 NR Desc: pathogenesis
  misc_feature: Homolog of GI Number: 58978057 NR Desc: pathogenesis
  misc_feature: Homolog of GI Number: 58977980 NR Desc: pathogenesis
  misc_feature: Homolog of GI Number: 18539471 NR Desc: JIOsPR10
  misc_feature: Homolog of GI Number: 58978001 NR Desc: pathogenesis
  misc_feature: Homolog of GI Number: 1408222 NR Desc: pathogenesis
  misc_feature: Homolog of GI Number: 1572683 NR Desc: early flowering protein 1
  misc_feature: Homolog of GI Number: 4325333 NR Desc: intracellular pathogenesis
  misc_feature: Homolog of GI Number: 939857 NR Desc: pathogenesis related protein
  misc_feature: Homolog of GI Number: 42565393 NR Desc: pathogenesis
MASVNSWTLEIASPVAPQRLFRAAVMDWHTLAPKVASHVVASAQPVEGDGGVGSVRQFNFTSVMPFSFMKERLEFLDADKCECKNTLIEGGGIGVAIETATSHIKVEPAAGGGSVVKVESTYKLLPGVEVKDEIAKAKESVTAIFKGAEAYLVANPDAYN

SEQ ID NO: 10097 - DNA, 563 bp, Zea mays
  misc_feature: Ceres CLONE ID no. 1591467
  misc_feature: Ceres CDNA ID no. 25445938
  CDS (106)..(387): REFERENCED BY SEQ ID NO: 10098
aaacgaaccatcaccgatcgattttatccctcacctgatgtgagccaaccgctcataccatctcatcccctgttgctgctcccagatgccgctccggaggaggagatgcccgccgcggccgaggaacaggcagcgcctgccgcgacggtgaaggtgctcttcttcgcccgcgcgcgggacctaacgggcgtggcggattccgcggtggaggtgccgccggggagcaccgcgggggagtgcctcgcgcgggtcctagcccagttccccaagctggaggagatccggggctccgtcgtgctcgcgctcaacgaggagtacgcggccgactcggccgcggtcgccgacggcgacgagctcgctgtcataccgcccatcagtggcggctgacgttattaaccacggccgacttgtgtggaggtaataaaagatatgaagacatcgatcgttgaggaaaaaaaaaagagagaagaaaggttcctctcccttcttcatggtcagtttatcaccacgaatgattgaaattattatatgctcgataaaataaaaaaaaaaaaaaaaaaaaa

SEQ ID NO: 10098 - protein, 93 aa, Zea mays [sequence omitted]

SEQ ID NO: 10099 - DNA, 751 bp, Zea mays
  misc_feature: Ceres CLONE ID no. 1591471
  misc_feature: Ceres CDNA ID no. 36695158
  CDS (2)..(637): REFERENCED BY SEQ ID NO: 10100
aatggcgaccactctttcgttatcctctcccctcttcctcggagctccggccagagctagagatgtggttccgtacggagtgacttgggctagtgtatcactgaggactctaaatgtgccaggcaagggttacacgagtagagttcgttgtcgggagcagcagcgacgaacggcaatagtatctatgcttggaaggaaatcaacggctagagccactgttgtcccagaccccgactataggttgccaatcgctatacttgggattgctagtgcttttgcatatgccgacaatcttctagctgctgcacctgtaggactgctggggcttcttcttttgttccagactacaagagtgaggttcgtctttgataacgaggccctggaggtgaaggttggagagcagctgcaggagtcaggtgaaaatgtattcgtcggcggcaagaaccgttggaagtactcaacgttcgtaaactgggagctgtggtggccacagtttcctgtcttggtttacttcaaggagacccaaacgaagcccgaaggacagatccacttcttccctgtgatattcgatggtcgacaattgtacgatgtgatggtggagcgtgctgggccctcgaagacgagtggccctaaatagttgcagctgatcttcctaccgtcgttttgctccctcgggctccctcacatttaaattgtaaaaatggtaaaattatatacaaacggggttcgattccaaaaaaaaaaaaaaaaa

SEQ ID NO: 10100 - protein, 150 aa, Zea mays
  misc_feature: Ceres CLONE ID no. 1591471
  misc_feature: Ceres CDNA ID no. 36695158
MLGRKSTARATVVPDPDYRLPIAILGIASAFAYADNLLAAAPVGLLGLLLLFQTTRVRFVFDNEALEVKVGEQLQESGENVFVGGKNRWKYSTFVNWELWWPQFPVLVYFKETQTKPEGQIHFFPVIFDGRQLYDVMVERAGPSKTSGPK

SEQ ID NO: 10101 - DNA, 795 bp, Zea mays
  misc_feature: Ceres CLONE ID no. 1591490
  misc_feature: Ceres CDNA ID no. 25445726
  CDS (221)..(595): REFERENCED BY SEQ ID NO: 10102
aacctcgccggaggtgctgctgctacggcggcggcggcgtactactactactacgacgaggcagcctccccatctcctgcgagttgcgtgctcaccgattcccgctcctctccattgcagactctgcgcgcgcacaagcccacaggagtgcagaattgaccgcgcgcacgacgacgacgaccaccaacagcaacaggagagaggaggagatcgataagggatggagggcggcgagacgacgctgtccgggttcggcggtgccggggcccccggcgtggacaccaaggtgctgcacgcgttccagaccagcttcgtgcaggtgcagacgctgctggaccagaaccgcctcctgatcaacgagatcaaccacaaccacgagtccaaggtgcccggcgacctctcccgcaacgtgggcctcatcagggagctcaacaacaacatccgccgcgtcgtcgacctctacgccgacctctcctcgctcttcgccgcggccgacggcggcggcggccgcgccgcgtccgagggcgggtccgtgggcaccgtccgccaccaggcgggcgccggccacaagaggatcaggtccggcctcgactgatttgttgccaggcatttcttcttcgcagagaaaaggagtagcagtactaagtacagtagctagccacgtaccaccagccgcagcgaaaccacctcccttttgtcttctgacttgagctcttcttgtatctatcgacatacgctatatatctatctatctatttatatgtctccattacgactgtaaaaaaaaaaaaaaaa

SEQ ID NO: 10102 - protein, 124 aa, Zea mays
  misc_feature: Ceres CLONE ID no. 1591490
  misc_feature: Ceres CDNA ID no. 25445726
  misc_feature: Homolog of GI Number: 34499881 NR Desc: early flowering 4
  misc_feature: Homolog of GI Number: 29247944 NR Desc: GLP_26_54603_52153
  misc_feature: Homolog of GI Number: 66777991 NR Desc: TPR repeat
MEGGETTLSGFGGAGAPGVDTKVLHAFQTSFVQVQTLLDQNRLLINEINHNHESKVPGDLSRNVGLIRELNNNIRRVVDLYADLSSLFAAADGGGGRAASEGGSVGTVRHQAGAGHKRIRSGLD

SEQ ID NO: 10103 - DNA, 480 bp, Zea mays
  misc_feature: Ceres CLONE ID no. 1591559
  misc_feature: Ceres CDNA ID no. 29191222
  CDS (91)..(282): REFERENCED BY SEQ ID NO: 10104
agtccatcaggcatccaagaagctcaaagcaagcagatctaagctccaggcagcgtcgcgacagagtgagtgagtagcacgacaacaacaatggcttccctgaaggccgcgaagcccagcggagttgcggcgcagggcaaggagccggcgcccaagctcagcgagacggcgacgaagccgtcagccgcgaagagcggcggcgttaagaaggctgagcagaagccccgggaaaccaaaaggaaggtgaagagcagcaaacaggcggcggcggccaaaaagtgacgtacagtacgtgtggagtgtaatggagcttccatgcatgagtgaatccatgccatgttatgaatctagtccttcctttcttgtatcttccatgtgacgcggcgtgtgcgtcccctcatgtgtgatgatgccagatgaatactacaaataagacgttgttgtgacaaaaaaaaaaaaaaaaaaaaaaaaaaaaaaaaa

SEQ ID NO: 10104 - protein, 63 aa, Zea mays; identical to SEQ ID NO: 8892
  misc_feature: Ceres CLONE ID no. 1591559
  misc_feature: Ceres CDNA ID no. 29191222
  misc_feature: Homolog of GI Number: 34911640 NR Desc: P0039G05.22

SEQ ID NO: 10105 - DNA, 790 bp, Zea mays
  misc_feature: Ceres CLONE ID no. 1591717
  misc_feature: Ceres CDNA ID no. 36706274
  CDS (101)..(550): REFERENCED BY SEQ ID NO: 10106
aatatatacgccgccatattcgcaagccaccgcaaccgaagcgcgccttcgccgccgcccccgcccccgccgcctctgcgatccccgcaaggtcgcaaacatgtctaccgtgctccagcgcccgacccccggcacggtccagtgcttcggccgcaagaagacggctgtggccgtcgcctacaccaagccggggcgcgggctgatcaaggtgaacggcgtcccgattgagctcatcaggccggagatgctccgcctcaaggccttcgagcccatcctgctggcggggcgctccaggttcaaggacatcgacatgaggatccgcgtccgaggcggcgggaagacgtcgcagatctacgccatccgccaggccgtcgccaaggggctcgtcgcctactaccagaagtacgtcgacgaggccgccaagaaggaggtcaaggacatcttcacccggtacgaccgcacccttctcgtcgccgaccccaggcgctgcgagccgaagaagttcggtggtcgtggcgcccgcgccaggttccagaagtcctaccgttgagcgctcggctgcccgctcttgccggacagttgcctgtgttgtcccaacttgccagatcgatgcctgtacccgtggcttaattttctatcatcggagctacttatgtggttctataactagatgctgttttaccttcaacttgtgctgttgtaccttcatatttggactttttaagccttgtgtcggacgcctttggcattgaaatatgagagattttgaagaccaaaaaaaaaaaaaaaa

SEQ ID NO: 10106 - protein, 149 aa, Zea mays; identical to SEQ ID NO: 190
  misc_feature: Ceres CLONE ID no. 1591717
  misc_feature: Ceres CDNA ID no. 36706274
  misc_feature (17)..(149): Pfam Name: Ribosomal_S9 PFAM Desc: Ribosomal protein S9/S16
  misc_feature: Homolog of GI Number: 77552917 NR Desc: ribosomal protein S9
  misc_feature: Homolog of GI Number: 7440266 NR Desc: probable ribosomal protein S16
  misc_feature: Homolog of GI Number: 2641209 NR Desc: ribosomal protein S16
  misc_feature: Homolog of GI Number: 6984222 NR Desc: 40S ribosomal protein S16
  misc_feature: Homolog of GI Number: 439654 NR Desc: RS16 protein
  misc_feature: Homolog of GI Number: 21555842 NR Desc: 40S ribosomal protein S16
  misc_feature: Homolog of GI Number: 4574242 NR Desc: ribosomal protein S16
  misc_feature: Homolog of GI Number: 16323500 NR Desc: putative 40S ribosomal protein S16
  misc_feature: Homolog of GI Number: 6721162 NR Desc: putative 40S ribosomal protein S16
  misc_feature: Homolog of GI Number: 62083431 NR Desc: ribosomal protein S16

SEQ ID NO: 10107 - DNA, 746 bp, Zea mays
  misc_feature: Ceres CLONE ID no. 1591739
  misc_feature: Ceres CDNA ID no. 25445941
  CDS (145)..(567): REFERENCED BY SEQ ID NO: 10108
aaccagaagctcactcactgctcgttgccggctgcccccgcggccccggccagtccatcccctcgctcgctccccaactccagcaggcagatcagatacatccatccattcgcggaccggaagcaggaaaggaagggttgaactatgagcgccgtggcggtttcgtcgtcgctgaacccggacgcgccgctcttcatcccggcggcgctgctgcaggtggaggacttctcgccgcagtggtgggacctcatcaccaccactgcctggttccgcgaccactggtcccgcgagcgcgcccacctggacgagatggccgagcagatcgacgcggccggcctcctccccgacgacgaggacctcttctacgacgaccagctcgagcagggccccgtcgccgccgcccttaagacagattcggtgctcaaggcgctgaacatgacctccccgaagggcggcggcgacgccccgcgggggttccgggagaaacccaggaacgccgagaagccgaccaagtacgccggcagccccaagagcaacgctccccgcgtgatccaccagcctcgctaggttcgctgggggaactcatcaggaaggctgctgcccctcttgcagccttgctcctggctgccgccgctgtcgtggtctgctctttcaagtcgaagtaacggtggttcgagctagtggatagtgtggctcaactgtagaagttccttttgtatagcaagcaagtaaaaaaaaaaaaaaaa

SEQ ID NO: 10108 - protein, 140 aa, Zea mays; identical to SEQ ID NO: 9628
  misc_feature: Ceres CLONE ID no. 1591739
  misc_feature: Ceres CDNA ID no. 25445941
  misc_feature: Homolog of GI Number: 21592689 NR Desc: ERD15 protein
  misc_feature: Homolog of GI Number: 20197424 NR Desc: ERD15 protein
  misc_feature: Homolog of GI Number: 8489786 NR Desc: dehydration
  misc_feature: Homolog of GI Number: 33415268 NR Desc: poly
  misc_feature: Homolog of GI Number: 33415266 NR Desc: poly
  misc_feature: Homolog of GI Number: 42571167 NR Desc: dehydration
  misc_feature: Homolog of GI Number: 56481295 NR Desc: early response to dehydration 15
  misc_feature: Homolog of GI Number: 56481331 NR Desc: early response to dehydration 15
  misc_feature: Homolog of GI Number: 56481323 NR Desc: early response to dehydration 15
  misc_feature: Homolog of GI Number: 29247944 NR Desc: GLP_26_54603_52153

SEQ ID NO: 10109 - DNA, 694 bp, Zea mays
  misc_feature: Ceres CLONE ID no. 1591828
  misc_feature: Ceres CDNA ID no. 25446574
  CDS (63)..(419): REFERENCED BY SEQ ID NO: 10110
actcttgtttcgccgaaccccaaaccccaaaccctagcttcgctcgttgcggcgagccggcgatggcgaagtctctgcgatccaaacgcgagaagcggcttcggacgttgcgccgggagatagcggagccgttctacgacaagaaggaggccgccaagctcgccgcgcaggccgcagccctagctgctgccccgctcccggtccgcgggcccccgccgtcccaggatgccggcacctcccgcgcagctagctcggcctcggctatggatgtggagatgtctggtgcagggaacagcaggtctaagaccttcctgaggccacttggcagcattagcaagaagaaggtgcagcttcatttgaagatcaagaaagacaagagaaaagctaggaagaagggaaagttttcttttaagaagtagaggagtgtatgataattcatgcagttttgttcccagtttgtaaaacaaacgcactgcagtcatgtgcacctacctaagttcattcgtgggtgacctaaatatgttgaaatgggtacgaaaaaaggatagtgctgacctatcagctgtttctgttctgcgggtataaatgtcaagtactcaaattgctgagattttgtttcattttcacattgtatcgtggtgaaccatgtttggaaacaatgtcgagcagttagggagtaaaaaaaaaaaaaaaa

SEQ ID NO: 10110 - protein, 118 aa, Zea mays
  misc_feature: Ceres CLONE ID no. 1591828
  misc_feature: Ceres CDNA ID no. 25446574
  misc_feature: Homolog of GI Number: 50928655 NR Desc: OSJNBa0085I10.17
MAKSLRSKREKRLRTLRREIAEPFYDKKEAAKLAAQAAALAAAPLPVRGPPPSQDAGTSRAASSASAMDVEMSGAGNSRSKTFLRPLGSISKKKVQLHLKIKKDKRKARKKGKFSFKK

SEQ ID NO: 10111 - DNA, 748 bp, Zea mays
  misc_feature: Ceres CLONE ID no. 1591905
  misc_feature: Ceres CDNA ID no. 25446575
  CDS (2)..(484): REFERENCED BY SEQ ID NO: 10112
agatttgacccatctcccaacccctacactcccggcggcggcgcaggagcagcagcaccagcacccgaggatggtgaagttcctcaagcccggcaaggccgtgatcctcctgcagggccggttcgccggcaggaaggcggtgatcgtgcgcgtgttcgaggagggcacccgcgaccgcccctacggccactgcctcgtcgccggcctcgccaagtaccccaagaaggtggtccgcagggactcggccaagaagacggcgaagaagtcgcgcgtcaagtgcttcatcaagctcgtcaacttcacccacctcatgcccacccgctacaccctcgacgtcgacttcaaggacgtggccaccggcgggcccgacgcgctctccacccgcgacaagaaggtcgccgcatgcaaggccgccaaggcgcgcctcgaggagaggttcaagaccggcaagaacaggtggttctttaccaagctccgcttctagatggtcggcgtcccgaatggtgaccgtcggtttcttgtatgggacacactccaagccatgtctcttttcgtattgccatgaagacttcttcgtgtttagtcctggggctctcaggtatattgtgcgtgtgtacttcgaatgtttggtcttggagtcctactgaattgatgaatgttcaatttatgtcttcaggattaacagcgaatattgtttacaatcttatttatcccattggttagtttgttaaagaaaaaaaaaaaaaaa

SEQ ID NO: 10112 - protein, 137 aa, Zea mays; identical to SEQ ID NO: 494
  misc_feature: Ceres CLONE ID no. 1591905
  misc_feature: Ceres CDNA ID no. 25446575
  misc_feature (5)..(40): Pfam Name: KOW PFAM Desc: KOW motif
  misc_feature (52)..(137): Pfam Name: Ribosomal_L27e PFAM Desc: Ribosomal L27e protein family
  misc_feature: Homolog of GI Number: 50906961 NR Desc: putative 60S ribosomal protein L27
  misc_feature: Homolog of GI Number: 37536910 NR Desc: putative ribosomal protein L27
  misc_feature: Homolog of GI Number: 20466061 NR Desc: putative ribosomal protein
  misc_feature: Homolog of GI Number: 8131701 NR Desc: ribosomal protein L27
  misc_feature: Homolog of GI Number: 23198420 NR Desc: putative ribosomal protein L27
  misc_feature: Homolog of GI Number: 21554529 NR Desc: ribosomal protein L27
  misc_feature: Homolog of GI Number: 7441035 NR Desc: ribosomal protein L27
  misc_feature: Homolog of GI Number: 7441033 NR Desc: ribosomal protein L27
  misc_feature: Homolog of GI Number: 20768 NR Desc: ribosomal protein L27
  misc_feature: Homolog of GI Number: 7441034 NR Desc: ribosomal protein L27
  misc_feature: Useful for making taller plants and plants with longer inflorescences

SEQ ID NO: 10113 - DNA, 652 bp, Zea mays
  misc_feature: Ceres CLONE ID no. 1592116
  misc_feature: Ceres CDNA ID no. 36707147
  CDS (112)..(465): REFERENCED BY SEQ ID NO: 10114
aaacggagaaaaagaaagaggagctcggacaaggcagagcgccatcgttcggtttccttgctgaattcccgatcgctcgctcgctcgaaaagaaagaagctagcttttagcatggcgtctctggcgttcggcagcaccgtagcggcggccgtggcggcgacatcggggaggacgcggccggcgcgccggtccgtgctggtcgtgccgcccgctgccagcaggggcggcccggcgccggccaaggaggagaagggcctcggcgagaccatcttcggcttcatcttcaagaaggaccagctggtggagacggacccgctcctcaacaaggtcggcgccgcgccggccgccgcctcccgcgccaagacgaccgccggcaagaaggctgccggcggcgacgacagcggcagcggcggggggttcaacctcggcggcctcggcgggctcttcgccaagaaaagcagctgaacgtggcgttgtttatggattgtcgaactcaaagctggatttggcttttgagggggaaatggttgcgcatatatatttgtggacgtgtggtggtgtgaccagtgatctttgatgtcataatgtgatatactctacttccagctgcacctgtgattttttttcaggactccaaaaaaaaaaaaaaaaa

SEQ ID NO: 10114 - protein, 117 aa, Zea mays
  misc_feature: Ceres CLONE ID no. 1592116
  misc_feature: Ceres CDNA ID no. 36707147
  misc_feature: Homolog of GI Number: 27529048 NR Desc: thylakoid soluble phosphoprotein
MASLAFGSTVAAAVAATSGRTRPARRSVLVVPPAASRGGPAPAKEEKGLGETIFGFIFKKDQLVETDPLLNKVGAAPAAASRAKTTAGKKAAGGDDSGSGGGFNLGGLGGLFAKKSS

SEQ ID NO: 10115 - DNA, 728 bp, Zea mays
  misc_feature: Ceres CLONE ID no. 1592152
  misc_feature: Ceres CDNA ID no. 25446576
  CDS (56)..(511): REFERENCED BY SEQ ID NO: 10116
aaacactcgtcgatctacacacatacatagtttcttctactacacgacgacaaacatggggaagcctgcgaagatcggagagtggggtggatacgccggcgatcgtcgggatctgagggctactccggaccggctgaccgaggtgaaggtcacggcggacaacagcagctgcatccgctccatctccttcatctacatcggagccgatggcaagccgtacgaggaggggccatggggtttcggccatgctggcacggagtacaagattgatctgtgcaggttcgacgagagcttgacggagatctccgggaccacgggcccagcctacaacattgacaatctggtcaagtctctcaaatttgtcaccaacaaacgtacttacggaccgtacggcagggacgagggcaccccgttccgtgtcaaggtgatgaacaacggccacgtcgctggcttctttggccgctctggagattgcctggacgcgatcgggctctacgtcaaccccaactaataactaaaacgatggatcggatcatctgcatgcatgcatatgcagtatgctgcttgcctagctgcctgtaacgaatatgaatgcataaaataacgcccctgctgctcccatatgcatcagcagtgtgtaccactatatatgttatatactgtatttcgctaccgaataaaaacataaataaaagatccagtgtcgtctgcaaaaaaaaaaaaaaaaa

SEQ ID NO: 10116 - protein, 151 aa, Zea mays
  misc_feature: Ceres CLONE ID no. 1592152
  misc_feature: Ceres CDNA ID no. 25446576
  misc_feature (15)..(150): Pfam Name: Jacalin PFAM Desc: Jacalin
  misc_feature: Homolog of GI Number: 77553871 NR Desc: jacalin homolog
  misc_feature: Homolog of GI Number: 77551205 NR Desc: NBS
  misc_feature: Homolog of GI Number: 34895152 NR Desc: Mannose
  misc_feature: Homolog of GI Number: 54778542 NR Desc: horcolin
  misc_feature: Homolog of GI Number: 77554452 NR Desc: jacalin homolog
  misc_feature: Homolog of GI Number: 397616 NR Desc: salT
  misc_feature: Homolog of GI Number: 2072553 NR Desc: salT gene product
  misc_feature: Homolog of GI Number: 1167955 NR Desc: putative 32.7 kDa jasmonate
  misc_feature: Homolog of GI Number: 1167953 NR Desc: putative 32.6 kDa jasmonate
  misc_feature: Homolog of GI Number: 38455904 NR Desc: jasmonate
MGKPAKIGEWGGYAGDRRDLRATPDRLTEVKVTADNSSCIRSISFIYIGADGKPYEEGPWGFGHAGTEYKIDLCRFDESLTEISGTTGPAYNIDNLVKSLKFVTNKRTYGPYGRDEGTPFRVKVMNNGHVAGFFGRSGDCLDAIGLYVNPN

SEQ ID NO: 10117 - DNA, 771 bp, Zea mays
  misc_feature: Ceres CLONE ID no. 1592265
  misc_feature: Ceres CDNA ID no. 25446260
  CDS (222)..(560): REFERENCED BY SEQ ID NO: 10118
agtgcggcaccgtcttgcagaatttttttcccctgcctagccatcccggccacccggggcccagggcccagggggaggggaaaccgaggcaggcggcggcggcggcgcagggcgcacgcgcttctcgtttcgtgtccccactccccagccgagggggagttggagggaaggaacgggaggcagcttcaaggaggaggctggcggccgagcgtccgtgcggcatggggagggacgagctgctgcggcggagcctcgtggcgctggcggcggccgtggccctcacgggcttggccacggcgtcgctgcgcaaggcggcggccacgtacggcttcggcatcctcgccatcgccggcgtgctgctcccggactgggagttcttcgaccgggactactcccagtggctcacccccatgcccgcctcccgacgcacggccgcggccgctgccgccgaccgggagcacgacgtctggaaattcaagccctatcctctgagggtggccatgctgacgaccatctacgggttcggtcttcacaagtggtggacgtacgtatctagctagcggggagtgggtcttcacagcatgaccgacgaacccgtcggttgaaatatcattgattaggttgtagccaagttcctctttttttttgttgttggattggaagaagaaaaatactgtgacagcgccttgtcacatctcagccgttcttcacggtgatcatgagatgagccagctgatatgaaaaaagatcttctaaaaaaaaaaaaaaaaa

SEQ ID NO: 10118 - protein, 112 aa, Zea mays
  misc_feature: Ceres CLONE ID no. 1592265
  misc_feature: Ceres CDNA ID no. 25446260
MGRDELLRRSLVALAAAVALTGLATASLRKAAATYGFGILAIAGVLLPDWEFFDRDYSQWLTPMPASRRTAAAAAADREHDVWKFKPYPLRVAMLTTIYGFGLHKWWTYVSS

SEQ ID NO: 10119 - DNA, 3237 bp, Zea mays
  misc_feature: Ceres CLONE ID no. 1592773
  misc_feature: Ceres CDNA ID no. 40041496
  CDS (307)..(2727): REFERENCED BY SEQ ID NO: 10120
agtcgccggcgactcgccaattttgatttgaagaaaagaaaccaccagccaccacgcccgcggccgtcagccggaggtgaagcacgcaattcattacaaaagggtcccctgccaagatccaacactcatgaattgcaacaatacggatcggagacagcgagcagatctcgcggacttgcaattgtaactcatctaatcccttattactttcgtcgttgtcgtcgtcgtcgtcgtcgtcgtcgtcatcatcattttgtgcagcctgttttatcttcttgccgcagcccctgctgagctgtgagctgtatgcatggcatggccacccctgtggcgcctcttctccatgatgagcctcaagctgctggtatcttactcccagggacaacccagcattcagatcaaacaaactctgactctagagttggagagcttatactgcctaatggggatacttatcgtggcgcgttatcgggcaacacgccacatggcccaggttgttatatctggtccgatggttgtgtttatgagggtgattggaggagaggcctcaggcatggccgaggcaagacgctgtggccaacaggggccacctacacaggtgactactccggtggctacatttatggtcagggaacgtataccgccgggcttaacagttacaggggaggctggaagctgaatcttaagcatggccaccttggcctacagacatatcccaacggagacacttttcaaggttcttgggtgcatgggcaaatgcaggggcatggcacctatacctgggcaaatgggaacacttatgttggcgccatgaaagatggggtcatgtcaggcaaaggaattctcacatggaacaatggagattcatttgaagggaactggttagatggtgccatgcatggctatggaatctacacatggaaggactctggctactatgtaggaacctggacaaggggggtcaaggacggaaaaggcacgttctatccaaaatgccgtgggattccggttaccgacatcgacgatttaagaaacagaggtgtactgcctggtgctgaaagccagactcatggttcccgtatccttcactctgcctcatcggacatggcagacatggtggctagcagaaatcaggactctgtaggtatttcatctgttagaagcttgaattttgagaaaactcgctccactaatgtgctactggaaagaaggtggagccttggagtggctattgaaaaattcctcggtcgcgaaaccaatgaaagttctgcaattgaaagatgtgaaaacaaggctgattccaaccttcctatactggaacgggaatatatgcaaggtgttctcatcagcgaggtcgtggtggatgcaagcttctcgaatccattaaaaagggtatcacgccgccagaagaaaatagtgaaggacataaagaaacctgggcagacaataattaaaggacataggagttatgatctgatgctcagtctgcagcttggaatcaggtatacagttggaaagattacacctattcagagacgtgaagtgcgagcttctgattatggttccagagcaagtttctggatgaacttccccaaaaatggttcacgacttactccttcacatcatgctgataattttaaatggaaagactactgcccaatggtgttcagaaatttgagggagatgttcaagattgatgcagcggattatatggtttccatttgtggaagtgacgcacttagggagctatcttctcctggaaagagtggaagtgtcttctttctatctcaggatgatcgatttatgatcaagactctacggaagtctgaagtgcaggttcttctacgaatgcttccagagtattatcaccatgtccgtacctatgagaacacactcataactaagttttttggcctccacagggttaaaccgtccagcagtcaaaagttccggtttgtagtgatgggaaacatgttttgcactgaacttagaattcaccggaggtttgacttgaaaggttcatccttaggccgctcaacagacaaagtaaaaatcgacgagaacacaacactgaaagacttggatctaaactattcattttatctcgagccttcttggcggcagactttgcttgcgcaaattgagaccgatagcaaatttctaaagcagcacgcaataatggattatagtttgcttcttggcgttcatttccgggctcctcaaagcctacggacacaggcatcctttcatcaagcaatcctaccagataggctggctgttctttcagaagaaggtgctctggaggaggatgttttgaacagtcctgaaggactggttttggttcagcgagctagtgatcaaaatgatgttgtcattggttcccatataaggggggcccgtcttcgatcatcaagtgcaagttttgagaaagtagatctcttgcttccaggcaccgcaaggctccagatccaacttggggttaacatgccggccagggcaaaacagacggttgaggatgatgacagtgaagataatggtcaggtgtatgatgtggtgctgtacctgggaataattgatatcttgcaggagtacagcataaggaagaagattgagcatgcttacaagtgcatccaatataactcattgtcaatatctgtcgtggaacccagtctctactcggagcgcttcctgaaattcattcaaactatctttcctgaaaattcataaaataaaatccagtaattcttcacctacaggagcaaagtgaaagaaacattgttcagtgtgcattgtggccctttgcaagtatgcttttgctacgtccttgattgattctctttctttacacatgttgatcatggtaaggatttccggattacgtatcccagtggtgctatccactagtagtggataactgtaccttgccctattaatctgagttgatgacgattctaccgtctacttcaaattcacactgtctaaacaatgttttgcacattcacttattcataccagtaaattcagccttagggctggtttggttttgtgacaaagggagattgaaggagaaataaactaatttctccctcagtgtcatccaatccacctgtgatttctagtcaccaaaccagaccttagtgtaccttgaattccacgtccattgtagtattgtatgtgtaaaaatgtccattgtagtattgtatgtgtaaaaatgttttgcaaaaaaaaaaaaaaaaa

SEQ ID NO: 10120 - protein, 806 aa, Zea mays
  misc_feature: Ceres CLONE ID no. 1592773
  misc_feature: Ceres CDNA ID no. 40041496
  misc_feature (470)..(802): Pfam Name: PIP5K PFAM Desc: Phosphatidylinositol
  misc_feature (50)..(72): Pfam Name: MORN PFAM Desc: MORN repeat
  misc_feature: Homolog of GI Number: 79313173 NR Desc: 1
  misc_feature: Homolog of GI Number: 73621405 NR Desc: Phosphatidylinositol
  misc_feature: Homolog of GI Number: 62733391 NR Desc: Putative Phosphatidylinositol
  misc_feature: Homolog of GI Number: 45434044 NR Desc: phosphatidylinositol
  misc_feature: Homolog of GI Number: 77548643 NR Desc: phosphatidylinositol
  misc_feature: Homolog of GI Number: 1931652 NR Desc: phosphatidylinositol
  misc_feature: Homolog of GI Number: 77553631 NR Desc: phosphatidylinositol
  misc_feature: Homolog of GI Number: 50939763 NR Desc: phosphatidylinositol
  misc_feature: Homolog of GI Number: 8885992 NR Desc: putative phosphatidylinositol 4
  misc_feature: Homolog of GI Number: 50918123 NR Desc: putative phosphatidylinositol 4
MHGMATPVAPLLHDEPQAAGILLPGTTQHSDQTNSDSRVGELILPNGDTYRGALSGNTPHGPGCYIWSDGCVYEGDWRRGLRHGRGKTLWPTGATYTGDYSGGYIYGQGTYTAGLNSYRGGWKLNLKHGHLGLQTYPNGDTFQGSWVHGQMQGHGTYTWANGNTYVGAMKDGVMSGKGILTWNNGDSFEGNWLDGAMHGYGIYTWKDSGYYVGTWTRGVKDGKGTFYPKCRGIPVTDIDDLRNRGVLPGAESQTHGSRILHSASSDMADMVASRNQDSVGISSVRSLNFEKTRSTNVLLERRWSLGVAIEKFLGRETNESSAIERCENKADSNLPILEREYMQGVLISEVVVDASFSNPLKRVSRRQKKIVKDIKKPGQTIIKGHRSYDLMLSLQLGIRYTVGKITPIQRREVRASDYGSRASFWMNFPKNGSRLTPSHHADNFKWKDYCPMVFRNLREMFKIDAADYMVSICGSDALRELSSPGKSGSVFFLSQDDRFMIKTLRKSEVQVLLRMLPEYYHHVRTYENTLITKFFGLHRVKPSSSQKFRFVVMGNMFCTELRIHRRFDLKGSSLGRSTDKVKIDENTTLKDLDLNYSFYLEPSWRQTLLAQIETDSKFLKQHAIMDYSLLLGVHFRAPQSLRTQASFHQAILPDRLAVLSEEGALEEDVLNSPEGLVLVQRASDQNDVVIGSHIRGARLRSSSASFEKVDLLLPGTARLQIQLGVNMPARAKQTVEDDDSEDNGQVYDVVLYLGIIDILQEYSIRKKIEHAYKCIQYNSLSISVVEPSLYSERFLKFIQTIFPENS

SEQ ID NO: 10121 - DNA, 1890 bp, Zea mays
  misc_feature: Ceres CLONE ID no. 1593234
  misc_feature: Ceres CDNA ID no. 40041497
  CDS (424)..(1476): REFERENCED BY SEQ ID NO: 10122
agccctggccgcctcgtagctcgtctccccctccaagttctgccccaggtccaggtccctgaagttgacgtacgccgcccggggcctggcgctcgcgtacggcgtcatgaaccggtgcacgccacgcacccacgccaggtgcgcgtcctcgtacgacacgttggcgtcgccgccccacttgacgaagtactgcacgttgtacaggtaccctcgccggtgcgcgtacggcgtgtccgactccggcgtctcgctcatcgccccgccctgcgggtccacgtcgacggacccgcccctgtcctccacgaccctggcgaggagcccgcccagcccggccgcggggatcggggacgtcaggtgggcgctcatctcggcgaccatcccgctgcagttcccgaggaacagtgacttgaaggtcaccgatggatgcctctcgccggcgtcgtcgacctccggctccatggccaccttcacgaacaggtcctcgggaagcgcgtgcgccacgcgctgccattttgtcaggaggcggacagccgcctgggtctgccgctggtccccgcggcgcacgaggcggcgcacggtgaaggcggaaacgacgggcggcacgggaaccagccgcaccgtccaggagaccacgacgccgaagctcccgccgccgccgccgcggatcgcccagaagaggccctcgcccatggcggcgcggtccaggagcctcccctcggcgtccaccacctcggcgtcgaccacgttgtccgcgccgaggccgtgcttgcgcatcatgggcccgaacccgccgccgctgaggtggccgccgacgcagaccgtggggcagatccccgcggggaacccgagcgccccgccgctctcgcgcgtcacggcgtagtagagctccccgagcgtggcgcccgggccggcccgcgccacgcggcgcccggcgtccacgcggacgtcgcggagcgcggcgacgtcgaccacggcgaagggccgggcgcccgccacggatcggtaggagaggccctcgtagtcgtggccgccgctgcgggcccggaccgtgaggccgtggcgcctgcagcaggtgacgcaggcccgcgcctcggcgacggtcgccggggtcagcagcagcgccgggcgcggcgtccgcggggacgcgaagcggaggttctggatcgtggcgttcagaagggaagggtacgaagcggccgacggggcgtggacgagcctggacgtgtcggtggtggccggcgagaggcgcgcgacgcagcggacgaagctcccgtggagggcgccgccgccgccttgctcctgcggggaacaagtctgggcgaggagcagcaggaagaggaaagggaggtgccaggatcttggtcgcacagccgccttcgtcttgctcatcatctcttgcacttacacggttacacctactctcttgccttgcctcgggtgtgcttttgtggattagttagtaacttgagacgctgatggcctttgaaaaatatgaaaacagagtgataaaataatatactggacactaattttacaaaaattcactggaacccaggcataagataattcgcggcagcagcaggtgggaaagagagcggtcgccgttgcaccgtcgttttcaggtgccgccagctttcaacgttagctcaccgtcactggtggcgtttcctgtatgcgtagggaaggggtatcgaggtgagtggcattgttgagatgaagacgatggcagctgacgggcgctctgcagccatgtatgatatgtattggcatgttctaggccagaaaggggcaatcaaagatacttgatgtatgtgttgtatgtgttttatatatgtatgtgtctagatttattatcgatcatttaaatagacagaaaaaaaaaaaaaaaaa

SEQ ID NO: 10122 - protein, 350 aa, Zea mays
  misc_feature: Ceres CLONE ID no. 1593234
  misc_feature: Ceres CDNA ID no. 40041497
  misc_feature: Homolog of GI Number: 66780099 NR Desc: PE
  misc_feature: Homolog of GI Number: 66778899 NR Desc: UvrD/REP helicase
  misc_feature: Homolog of GI Number: 66778264 NR Desc: LigA
  misc_feature: Homolog of GI Number: 66776103 NR Desc: LigA
  misc_feature: Homolog of GI Number: 67987177 NR Desc: 4Fe
  misc_feature: Homolog of GI Number: 66776365 NR Desc: PE
  misc_feature: Homolog of GI Number: 67984658 NR Desc: type II secretion system protein E
  misc_feature: Homolog of GI Number: 67987580 NR Desc: ABC transporter
  misc_feature: Homolog of GI Number: 67986009 NR Desc: Recombination protein O
  misc_feature: Homolog of GI Number: 67985765 NR Desc: Pantoate
MPLAGVVDLRLHGHLHEQVLGKRVRHALPFCQEADSRLGLPLVPAAHEAAHGEGGNDGRHGNQPHRPGDHDAEAPAAAAADRPEEALAHGGAVQEPPLGVHHLGVDHVVRAEAVLAHHGPEPAAAEVAADADRGADPRGEPERPAALARHGVVELPERGARAGPRHAAPGVHADVAERGDVDHGEGPGARHGSVGEALVVVAAAAGPDREAVAPAAGDAGPRLGDGRRGQQQRRARRPRGREAEVLDRGVQKGRVRSGRRGVDEPGRVGGGRREARDAADEAPVEGAAAALLLRGTSLGEEQQEEEREVPGSWSHSRLRLAHHLLHLHGYTYSLALPRVCFCGLVSNLRR

SEQ ID NO: 10123 - DNA, 2094 bp, Zea mays
  misc_feature: Ceres CLONE ID no. 1593776
  misc_feature: Ceres CDNA ID no. 29191339
  CDS (53)..(1951): REFERENCED BY SEQ ID NO: 10124
aattggagaggcgggggaggatagcatcagaggaagagtcagagcagcggggatggtggtgcagaagcagaggagggtgccggccgaggttttctggccaaaggtcgtgctcaagaagtggctcaacctcaagagcaaggacctggacttgggcgcctccttggccgccgatgacgacgacgacgacgacggtagcgacgttgacggccaagagcactgcggctgtgacgacggcggcggcggcggcggcgctcgcaggccggacgatgacggcgacggcgcccagatcaccgacgagagcctggagagcgcgccgtacaagctgcggcggcggaactcggagacgctgcgcgcgcagtacatcaacaccaaagagctgagggtctgcgtcggcacctggaacgccggcggcaaggcgccgccgaacgacctcgacatcgccgagtggctcggcactggcggcgacgccgagcccgccgacatctacgtgctcgggttccaggaagtggtgccgctgaacgccagcaacgtgttcggcgcggaggacgggcggccggcgcgggcgtgggagtccgtgatccgcggcgcgctgcggcaggcgcagccgccggcgcccaggtacaggtgctacagccaccctccctcgccgtcgcggttcgagcccccgatcggtgccgccgaagagctcctccccggcggcacggacaccgagaccgacaccgacgaggacgtgcccttgggcgaccccgtcgcggcagccactccgaccccgagaaagctgagcaggctcaaccacttcagcgtcgtcgtgggcgagaacgagaacggctcatcggagctcaacggcgacgaactggacgacgggcctgaccagccgccgcagcagctaagccttcagcagcgggcgctgctgaggtccctgagccgggcggacagggtaggggtgctctggccggagcagccgctggacctactccccgcgtcgtcggcgtcggcgtcggcgtcagcgtcgttcagggcgtccaagtcgttcagccgggccgcctacaggtcgtcgttcagggggtcgtcccgcgtggcggccgacgtggtggatgacctgcccatgatcccggacctcgacctggacggcgcgctgcggaagaagggccggtcgccgttcgtgcgcatcgtgagcaagcagatggtggggatcttcctgacggtgtgggtgcggcggggcctccggaagtgcgtgcagagtctcaaggtctccaccgtcggcgtcggcgccatgggctacatcggcaacaagggggccgtgtcggtgagcatgtccgtgtaccagaccatgttctgcttcgtgtgcagccacctcgccgccggcgagaagcccggcgacgtccacaagcgcaacgccgacgtgcacgagatccaccgccgcacgcgcttcgccgccccgggcgacctgcagctgcccagaaacatccacgaccacgaccggatcttctggctgggcgatctgaactaccggctggacgcgtcgtacgagcgagcgcacgagctgatctcggcgggaagctggcgcgagctggccgagacggaccagctgaagcgggagctgaggaaggggcgagcgttcgacgggtggacggagggcgtcctggagttcgcgccgacgtacaagtacgagctcggctcgaggaggtacgtcggcgtcggcgaccaccagagccagaggggcggcgggcggcggacgccggcgtggtgcgaccgggtgctgtcgtacggcaaggggctgaggctgctgggctaccggcggtcggagctggcgctgtcggaccaccgtccggtgacggccacgtacgcggcggaggtggaggtgttctccagccggaagctgcagagggcgctgacgctcacggacgccgaggtggagggcggccaggtcgtgccggacctcgatttttgaccgggggtcagccgtccttctattttcgcgggaaaaatgtcagttgtaaatatgggtatgtatgagtaagagtgagctcaatgagcttctgaatgcattggccgatcgatgtatctccatttagtcaaaaaaaaaaaaaaaaa

SEQ ID NO: 10124 - protein, 632 aa, Zea mays
  misc_feature: Ceres CLONE ID no. 1593776
  misc_feature: Ceres CDNA ID no. 29191339
  misc_feature (111)..(598): Pfam Name: Exo_endo_phos PFAM Desc: Endonuclease/Exonuclease/phosphatase family
  misc_feature: Homolog of GI Number: 15081807 NR Desc: At1g71710/F14O23_9
  misc_feature: Homolog of GI Number: 24111401 NR Desc: At1g71710/F14O23_9
  misc_feature: Homolog of GI Number: 34906250 NR Desc: P0489A01.10
  misc_feature: Homolog of GI Number: 55770761 NR Desc: putative inositol polyphosphate 5
  misc_feature: Homolog of GI Number: 12323727 NR Desc: putative inositol polyphosphate phosphatase
  misc_feature: Homolog of GI Number: 30693006 NR Desc: inositol polyphosphate 5
  misc_feature: Homolog of GI Number: 4204695 NR Desc: putative inositol polyphosphate 5
  misc_feature: Homolog of GI Number: 30102676 NR Desc: At1g34120
  misc_feature: Homolog of GI Number: 10444261 NR Desc: inositol polyphosphate 5
  misc_feature: Homolog of GI Number: 42571739 NR Desc: inositol polyphosphate 5
MVVQKQRRVPAEVFWPKVVLKKWLNLKSKDLDLGASLAADDDDDDDGSDVDGQEHCGCDDGGGGGGARRPDDDGDGAQITDESLESAPYKLRRRNSETLRAQYINTKELRVCVGTWNAGGKAPPNDLDIAEWLGTGGDAEPADIYVLGFQEVVPLNASNVFGAEDGRPARAWESVIRGALRQAQPPAPRYRCYSHPPSPSRFEPPIGAAEELLPGGTDTETDTDEDVPLGDPVAAATPTPRKLSRLNHFSVVVGENENGSSELNGDELDDGPDQPPQQLSLQQRALLRSLSRADRVGVLWPEQPLDLLPASSASASASASFRASKSFSRAAYRSSFRGSSRVAADVVDDLPMIPDLDLDGALRKKGRSPFVRIVSKQMVGIFLTVWVRRGLRKCVQSLKVSTVGVGAMGYIGNKGAVSVSMSVYQTMFCFVCSHLAAGEKPGDVHKRNADVHEIHRRTRFAAPGDLQLPRNIHDHDRIFWLGDLNYRLDASYERAHELISAGSWRELAETDQLKRELRKGRAFDGWTEGVLEFAPTYKYELGSRRYVGVGDHQSQRGGGRRTPAWCDRVLSYGKGLRLLGYRRSELALSDHRPVTATYAAEVEVFSSRKLQRALTLTDAEVEGGQVVPDLDF

SEQ ID NO: 10125 - DNA, 2320 bp, Zea mays
  misc_feature: Ceres CLONE ID no. 1595398
  misc_feature: Ceres CDNA ID no. 25892108
  CDS (214)..(1935): REFERENCED BY SEQ ID NO: 10126
agcttcccccgtaataataaccgaatccccagaccaaatcgccgtcgccgtcgcatcgcagcagcgggagtcccagggtcccggaccgaatccatttccagacacccaaggccaagatccatcgctcgttccaacctgcctcctccttcttctgcttggtcgtctgatctcgttttccattcgtgtccaatccgatccagccaaccgctgtgaatgatggcgctcaacctgtcccaccagaccggcgcggccgtggcggcggcaccggcggcgccacgagcggccgtcgtcgcggcggcggccacggcgccacgctcggccgtcgtcgctgcggcggccaccgtggcgccgccgcccgcgtcggcgcccgcccccgctccggcgctccagctgcagacgatgacggtggacccggcccccgcgcaggcgcccgacgcggtgaagccggacctcgccatggcgtgccaggcgctggtggaggccgcgcccgaggcggagcacgccgacgtcgccgccgagctccggagcagggccggggtgcccgtcttcgtcatgatgccgctcgacaccgtgcgcaaggacggcaactcgctcaaccggcgcaaggccgtggaggccagcctggcggcgctcaagagcgccggggtggagggcatcatggtggacgtctggtggggcatcgccgaggccgacgggcccgggcagtacaacttcaacgggtacatggagctcatggagatggccaggaagaccgggctcaaggtccaggccgtcatgtccttccaccagtgcggcggcaacgtcggcgattcagtcaccataccacttccgggatgggtcttggaggagatggacaaggaccaggacctggcctacaccgaccggagtggccgccggaactacgagtacgtctccctgggctgcgacgcgatgcccgtgctcaagggccgcacccccatccagtgctacgccgacttcatgcgcgccttccgcgaccacttcgccaccttcatgggcaacaccatcgtggagatccaggtcggcatgggccctgccggcgagctgcgctacccgtcctacccggagagcgacggcacctggtcgttccctggcatcggcgagttccagtgctacgacaggttcatgctgagtagcttgaaggcggctgctgaggcagtgggcaagccggagtggggcaacgcgggtccgggcgactccggcagctacaaggactggccggaggacacgggcttcttccggcgcgagggcggctggagcacggagtacggggagttcttcatgagctggtactcgcagatgctcctggagcacggcgagcgcatcctgtcggcggcgacgggcgtgttcacggggtcccccggcgtgaagatctcggtgaaggtggccgggatccactggcactacggcacccggtcccacgcggcggagctgacggcggggtactacaacacccggtcgcacgacgggtacgcgcccatcgcgcgcatgctggcgcgccacggcgccgtgctcaacttcacgtgcgtggagatgcgcgaccacgagcagccgcaggacgcgcagtgccgccccgaggcgctggtgcagcaggtggccgccgcggcgcgggaggccggcgtgggcctggccggcgagaacgcgctgccgcgctacgacgacacggcgcacgaccaggtggtggccactgccgccgacagggccgccgaggaccgcatggtggccttcacgtacctgcgcatggggcccgacctgttccagcccgacaactggcgccgcttcgccgcgttcgtcaagcgcatgacggagccgggcgcgcgggaggcgtgccgggagcaggtggagcgggaggccgagggcgtcgcgcacgccacccagcccctcgtgcacgaggccgccgtcgcgctcaccaactgaccggaccggccggcgttccccgtcgactgtgttcgatcgctagacggggtggcacgctgcgacgactacctgtatggcgagtccctatacttactcatacataagctgcgccgccgtgtcgtcggtgcgtgcaccgcgcagtagtgtgcgtacagcggaagctgcgactgcgagcgaggtagggtgtggggtgggtgactgggtaccaggagtggggtacggtacgtaggtgccacgttggaggctttggcgtttgctcagagcctggcaggagatgggtttgatgttctgctgctgtgttactgtatcctacacctacagaatgtgctatgatttgtactgctataatttttaacgaagatacaaacttctaaaaaaaaaaaaa

SEQ ID NO: 10126 - protein, 572 aa, Zea mays
  misc_feature: Ceres CLONE ID no. 1595398
  misc_feature: Ceres CDNA ID no. 25892108
  misc_feature (136)..(183): Pfam Name: AP_endonuc_2 PFAM Desc: Xylose isomerase
  misc_feature: Homolog of GI Number: 15082058 NR Desc: beta
  misc_feature: Homolog of GI Number: 59668408 NR Desc: beta
  misc_feature: Homolog of GI Number: 7435338 NR Desc: probable Beta
  misc_feature: Homolog of GI Number: 31432570 NR Desc: putative amylase
  misc_feature: Homolog of GI Number: 20465963 NR Desc: putative beta
  misc_feature: Homolog of GI Number: 7268460 NR Desc: putative beta
  misc_feature: Homolog of GI Number: 21593185 NR Desc: putative beta
  misc_feature: Homolog of GI Number: 17224922 NR Desc: putative chloroplast
  misc_feature: Homolog of GI Number: 37536926 NR Desc: putative chloroplast
  misc_feature: Homolog of GI Number: 46015332 NR Desc: Chain A
MALNLSHQTGAAVAAAPAAPRAAVVAAAATAPRSAVVAAAATVAPPPASAPAPAPALQLQTMTVDPAPAQAPDAVKPDLAMACQALVEAAPEAEHADVAAELRSRAGVPVFVMMPLDTVRKDGNSLNRRKAVEASLAALKSAGVEGIMVDVWWGIAEADGPGQYNFNGYMELMEMARKTGLKVQAVMSFHQCGGNVGDSVTIPLPGWVLEEMDKDQDLAYTDRSGRRNYEYVSLGCDAMPVLKGRTPIQCYADFMRAFRDHFATFMGNTIVEIQVGMGPAGELRYPSYPESDGTWSFPGIGEFQCYDRFMLSSLKAAAEAVGKPEWGNAGPGDSGSYKDWPEDTGFFRREGGWSTEYGEFFMSWYSQMLLEHGERILSAATGVFTGSPGVKISVKVAGIHWHYGTRSHAAELTAGYYNTRSHDGYAPIARMLARHGAVLNFTCVEMRDHEQPQDAQCRPEALVQQVAAAAREAGVGLAGENALPRYDDTAHDQVVATAADRAAEDRMVAFTYLRMGPDLFQPDNWRRFAAFVKRMTEPGAREACREQVEREAEGVAHATQPLVHEAAVALTN

SEQ ID NO: 10127 - DNA, 2781 bp, Zea mays
  misc_feature: Ceres CLONE ID no. 1595427
  misc_feature: Ceres CDNA ID no. 40041498
  CDS (413)..(2680): REFERENCED BY SEQ ID NO: 10128
aaaactactatagcctagctagagccagctgcttgcctcgccctcccctttgcgcgtcgtcgcgctcctcgccgtccccctctctcggaatcggaaggcgatcgatcgcacaaggctgcgtctgcgtgctcggccgccgcccgacccgaccggacaaggaggggagggggcaaaaaaaatatatagttagtcacacgcacgcagcacaggagggaggagagggattgagggataaagaaatttcgggagacaaggagagagagacagagatggagaggagcggctggactcggaggcaggcctttcactactcccgcacccagataacgatgtggtagctagttcctcttaggctaaggaaggaggtcgtggccgggatcccgccgatgatgatgacagtggcgccgccggcatgggcgtagcggcgccaccgtacgagaccaccacgtacgtgagccaacgcaccaagatcaacatcgcagcgatctccgccgccgccgccaccagggcggctaccgcggcttctatgtcccactcgcagggattccaccagggcagcgccggcgtctacggctactcctcggatggcttcgaccgcccggacgactccggccaccaggaccatcatcagcagcagcagcacgtggcgcagcagagccgccgcgacaagctgagggtgcaggggttcgacccggccgccggcggcggccacggcctgctccccatcgagggcgacgagcatggcgggcccgggtccatgtacgagcacgcggcggtcgcagctggggcctccaacatgctctccgagatgttcaacttccccgcgccgccgtcggggccctccgccaccgagctgctggccagccagatgggcgccaactaccgcttcggggggctacggcagcagcagcagcaggggcccggaggggtggtggctggcttgtccggcgacggcggttggttcgtcggggccggcgcggcgggtcgtgctgctggcttggtcctcggtggtggggccaacatggggtcgttaggtgaaacgtcgtccccgaagcagcagggcagcatggctgggctggccaccgacccggccgccgcgatgcagctcttcctgatgaacccgcagcagcagcagcagtccagatcgtcgccgccgtcgccgtcggacgtccaggtccagcaccacgaggcggcgttccaggcgttcggaaacgccggggccccgtttggcggcggcgccgggaccggcgtcgtggaaggccaggggctgtccctgtcgctgtcgccgtcgctgcagcagctggagatggcgaagcaggccgaggagctgagggtccgggacggcgtgctctacttcaaccgccagcagcagcagcagcagcagcagctgccgatggcattgcacggccaggtcggcgcgctggggcagcagctgcacgtcggctacggccccgccggcgtcgcgggcgtgctgcgcaactccaagtacacccgcgcggcgcaggagctcctcgaggagttctgcagcgtcgggcgcgggcagatcaagggcggcgggcgaggggcctcggcgtctaaccctaacaacaacccgggcaacaagggcggcgcctccagctccggcgccgccgcgcagtccccgtcgtccgcgcccaacaaggagcccccgcagctgtcccccgccgaccggttcgagcagcagcgcaagaaggccaagctcatctccatgctcgacgaggtggaccggcggtacaaccactactgcgaccagatgcagatggtggtgaacttcttcgactcggtgatggggttcggcgcggcgacgccgtacacggcgctggcgcagaaggcaatgtcgcggcacttccggtgcctcaaggacgccatcgcggcgcagctgcgggccacgtgcgagctgctgggcgagaaggacgccggcaccagctcgggcctcaccaagggcgagacgccgcggctgcgcgccatcgaccagagcctccgccagcagcgcgccttccaccacatggggatgatggagcaggaggcatggcggccccagcgcggcctccccgagcgctccgtcaacatcctccgctcatggctcttcgagcacttcctccacccgtacccgagcgacgccgataaacacctgttggcgaggcagaccgggctgtccaggaaccaggtctccaactggttcatcaacgcccgtgtccggctatggaagcccatgatcgaagagatgtatcagcaggagtgcagggagctcgacggctcctcggccggcggcgggggccccgagtccgtcaacgacccctccggcgccgacgactcgcactccccgaccaccaccggcgcagcgcagctcccgcaacagcaacatcacctcggcacggtgcctggggtgatgccccacaagcccgacccgggcgccgccggtccctcggctgcggacgcggcgttcgtcgggatcgaccctgtggagctccttggcggtggcgcggacgacttgtacgggcggttcgagcccggggtgagggtgcgctacgggcccgctgcggcaggcgctgctgccggcgacgtgtcgctgacgctgggcctgcagcacgccggcgccggcaacgccgccgggcccgacagcaccgggcggttctccttgagagactacagcggttgttgatgcttacacatcgcttacatcacctttattcatggctcatgcatgcgcccatcatgcatttggaagagcaaggatcgacgaaagaaaaaaaaaaaaaaaaa

SEQ ID NO: 10128 - protein, 755 aa, Zea mays
  misc_feature: Ceres CLONE ID no. 1595427
  misc_feature: Ceres CDNA ID no. 40041498
  misc_feature (352)..(494): Pfam Name: POX PFAM Desc: Associated with HOX
  misc_feature (547)..(605): Pfam Name: Homeobox PFAM Desc: Homeobox domain
  misc_feature (563)..(602): Pfam Name: Coprinus_mating PFAM Desc: Coprinus cinereus mating
  misc_feature: Homolog of GI Number: 13752407 NR Desc: homeodomain protein JUBEL1
  misc_feature: Homolog of GI Number: 50540719 NR Desc: putative homeodomain protein
  misc_feature: Homolog of GI Number: 7239157 NR Desc: homeodomain protein
  misc_feature: Homolog of GI Number: 15215857 NR Desc: AT4g36870/C7A10_490
  misc_feature: Homolog of GI Number: 79326370 NR Desc: BLH2
  misc_feature: Homolog of GI Number: 22652119 NR Desc: BEL1
  misc_feature: Homolog of GI Number: 13877513 NR Desc: BEL1
  misc_feature: Homolog of GI Number: 79322883 NR Desc: BLH4
  misc_feature: Homolog of GI Number: 22652123 NR Desc: BEL1
  misc_feature: Homolog of GI Number: 77548772 NR Desc: homeodomain transcription factor
MGVAAPPYETTTYVSQRTKINIAAISAAAATRAATAASMSHSQGFHQGSAGVYGYSSDGFDRPDDSGHQDHHQQQQHVAQQSRRDKLRVQGFDPAAGGGHGLLPIEGDEHGGPGSMYEHAAVAAGASNMLSEMFNFPAPPSGPSATELLASQMGANYRFGGLRQQQQQGPGGVVAGLSGDGGWFVGAGAAGRAAGLVLGGGANMGSLGETSSPKQQGSMAGLATDPAAAMQLFLMNPQQQQQSRSSPPSPSDVQVQHHEAAFQAFGNAGAPFGGGAGTGVVEGQGLSLSLSPSLQQLEMAKQAEELRVRDGVLYFNRQQQQQQQQLPMALHGQVGALGQQLHVGYGPAGVAGVLRNSKYTRAAQELLEEFCSVGRGQIKGGGRGASASNPNNNPGNKGGASSSGAAAQSPSSAPNKEPPQLSPADRFEQQRKKAKLISMLDEVDRRYNHYCDQMQMVVNFFDSVMGFGAATPYTALAQKAMSRHFRCLKDAIAAQLRATCELLGEKDAGTSSGLTKGETPRLRAIDQSLRQQRAFHHMGMMEQEAWRPQRGLPERSVNILRSWLFEHFLHPYPSDADKHLLARQTGLSRNQVSNWFINARVRLWKPMIEEMYQQECRELDGSSAGGGGPESVNDPSGADDSHSPTTTGAAQLPQQQHHLGTVPGVMPHKPDPGAAGPSAADAAFVGIDPVELLGGGADDLYGRFEPGVRVRYGPAAAGAAAGDVSLTLGLQHAGAGNAAGPDSTGRFSLRDYSGC

SEQ ID NO: 10129 - DNA, 2331 bp, Zea mays
  misc_feature: Ceres CLONE ID no. 1595455
  misc_feature: Ceres CDNA ID no. 36701618
  CDS (402)..(2129): REFERENCED BY SEQ ID NO: 10130
agcatgttcatggctagatccggcagcatatagcggcagggtgagatatttctagctactgcagtgtgcagcgcgggaacgtaggacggatggagcaggggtcccgtcgtcgtcccacttcgtccctgtcgcgcttaatgctgccattaaactgactgcttgcagctcatccgtgctggcgagctccactaataaatgcgtgcgtatctgtgtgcatcgcggcagccggcagggaagggctggacacgattgcgcgtctgcgcttcagcctccagttcccggtgacgacgcccactagtctctactagataggcagcgccggtgctgctgctgccgccgccgatcagggcttcgcctcccctgttctcgcgaagatccgattgctttcgcccgccacccgcatggctccggcgtccgagacggagctgcaagcaccaccaccggcgtcggctaaggagatcaagtcgccggaggtgctgccggagccaggctcgctgtcagcgctgcagcgcaagaagctgggtgcgcacttcatggagagcgacgagcgccgcgtcttccgcgccaggacacctctcggcgccgcctacgaaccgccctccgccgccgccggcggcggcggcaccacgccggtcaacatccgcggcgagcccatccaggacctgtcgaggaccggggggtgggtggccgccttcttcatcttcggcaacgagatggcggagcgcatggcctacttcgggctctccgtcaacatggtcatcttcatgttcaaggtgatgcaccgcccgttcgccagctccgccaacgccgtcaacaacttcctgggcatctcccaggcgtcctccgtgctgggtggcttcctcgccgacgcctacctggggcgctactggaccatcgccatcttcaccaccatgtacctgctggggctcatcgcgctcaccgtgagcgccagcgtgccggcgctcgtgccgccgcaggagggctgcgacaagctcgccatgctgctgggcgcctgcgcgcccgccgcgccctggcagatggcctacctccagacggcgctctacgtgacggcgttgggcgcggcggggatccggccctgcgtctcctccttcggcgccgaccagttcgacgagcgcagccccgggtacaagcgccggctcgaccgcttcttcaacctcttctacctcgccgtcacgctcggcgccatcgccgccttcacggccgtggtctacatccagatgcagcacggctgggcggcggcgttcggcacgctggcgctggccatgggcacctccaacgcgctcttcttcgtgggcacgccgctgtaccgccaccgcctgccggggggcagcccgctcacgcgggtggcgcaggtgctcgtcgccgccttcaggaagcgggacgcggccttcgacagcggcgacttcgtcggcctgtacgaggtcgccggcgccaagtccgccatccgtggcagcgccaagatcgaccacaccgacgacttcagatggctcgacaaggccgcgctgcagctggagggtgacctcgccggcggcgaggacgaggaggcggtgaacccgtggcgtctgtgcacggtgacgcaggtggaggaggtgaagatcctgctgcggctgctgccggtgccggcgtgcacggtgatgctgagcgtggtcctcaccgagttcctcacgctgtcggtgcagcaggcctatacgctgaacacccgcgtggcggcgctgcacctgcccgtgacgtgcatgccggtgttcccctgtctggccatcttcctcatcctggcgctctactaccagaccttcgccccgctggcgcgccgcctgacgggccacccgcacggcgcctcccagctgcagcgcgtcgggctgggcctcttcttctccatcctgtccgtggcctgggcggggctcttcgagcggtaccgccgcgggtacgccgtccgccacggatacctcggcctcttcctcacgcccatgccggacctcagcgcctactggctgctcatccagtactgcctcatcggcgtggccgaggtgttctgcctcgtcgcgctcctggagttcctgtaccaggaggcgcccgacgcgatgcgcagcgtcgggtccgcgtacgcctgacagaagtccctaagacgagatggaattcccacacacacacgagatggatactggtgtattgctattgcaaaggccacacattctctgtggttgctatctctatttaaacaaagaactgactgcattacatggtaggaaattattctgctaatcaaggcatgctcgtgatcggtagttgccatctcaaaaaaaaaaaaaaaaa

SEQ ID NO: 10130 - protein, 575 aa, Zea mays
  misc_feature: Ceres CLONE ID no. 1595455
  misc_feature: Ceres CDNA ID no. 36701618
  misc_feature (162)..(574): Pfam Name: PTR2 PFAM Desc: POT family
  misc_feature: Homolog of GI Number: 74011495 NR Desc:  similar to solute carrier family 15
  misc_feature: Homolog of GI Number: 22136152 NR Desc: peptide transporter
  misc_feature: Homolog of GI Number: 50900586 NR Desc: putative peptide transport protein
  misc_feature: Homolog of GI Number: 4102839 NR Desc: LeOPT1
  misc_feature: Homolog of GI Number: 50540680 NR Desc: putative peptide transporter 1
  misc_feature: Homolog of GI Number: 16604436 NR Desc: At1g62200/F19K23_13
  misc_feature: Homolog of GI Number: 34895718 NR Desc: putative peptide transport protein
  misc_feature: Homolog of GI Number: 50933627 NR Desc: putative peptide transport protein
  misc_feature: Homolog of GI Number: 6635838 NR Desc: amino acid/peptide transporter
  misc_feature: Homolog of GI Number: 2655098 NR Desc: peptide transporter
MAPASETELQAPPPASAKEIKSPEVLPEPGSLSALQRKKLGAHFMESDERRVFRARTPLGAAYEPPSAAAGGGGTTPVNIRGEPIQDLSRTGGWVAAFFIFGNEMAERMAYFGLSVNMVIFMFKVMHRPFASSANAVNNFLGISQASSVLGGFLADAYLGRYWTIAIFTTMYLLGLIALTVSASVPALVPPQEGCDKLAMLLGACAPAAPWQMAYLQTALYVTALGAAGIRPCVSSFGADQFDERSPGYKRRLDRFFNLFYLAVTLGAIAAFTAVVYIQMQHGWAAAFGTLALAMGTSNALFFVGTPLYRHRLPGGSPLTRVAQVLVAAFRKRDAAFDSGDFVGLYEVAGAKSAIRGSAKIDHTDDFRWLDKAALQLEGDLAGGEDEEAVNPWRLCTVTQVEEVKILLRLLPVPACTVMLSVVLTEFLTLSVQQAYTLNTRVAALHLPVTCMPVFPCLAIFLILALYYQTFAPLARRLTGHPHGASQLQRVGLGLFFSILSVAWAGLFERYRRGYAVRHGYLGLFLTPMPDLSAYWLLIQYCLIGVAEVFCLVALLEFLYQEAPDAMRSVGSAYA

SEQ ID NO: 10131 - DNA, 2110 bp, Zea mays
  misc_feature: Ceres CLONE ID no. 1595880
  misc_feature: Ceres CDNA ID no. 35383467
  CDS (130)..(1788): REFERENCED BY SEQ ID NO: 10132
aaccaattgaactgaatggaccagtcgacgtcatcgcctccctcgcctatccgctcggccgttggcgctcaccaaaaccacccagaagcctccgcttgaccgcttcactcgctttccgcccgccgcgccatgagcgccgccgcctgcctgttcgctgccgccgtctccctatcattcccgtcgacctccgcaccctcttccgcaagacgccgccgcctccggagccccaccaccctcctccgctgctccccgactcgccgccgtgggccggtccggcggacactcgacgagcggctgctcgaggccgcgccggcggagaccgaagacgtccaaaccgctgttgatgtagaggatggaggagggatcgctgagggcgatgaagtgggaacagaggagatggaggagctggagcagcgaccgccgacgagggctttcgtgaagagcaggcggcagcggcaggaagaggaggaagccgcggcggggcaagaccggttcaagctcatcaatggcaaagagatatttcaagagaaggcttatctggttggtgttgagtgcaaacggacaggagggaacctgttcggcatagaggagtcccttaaggagctggagcagttggctgatacggcgggccttctggtagtcggctcaacctatcagaagctttctaccccaaatccaaggacttacattggttcaggaaaggtttctgaaatcaggactgcaatccaagcacttgatgttgagactgtaattttagacgatgagttatcccctggacaactacgtaacttggaaaagtcatttggtgggagtgtccgagtctgtgatcgaactgctcttattcttgatatttttaatcaaagggcagcaacacatgaagcttctttacaggttactttggcacagatggaatatcaacttcctaggttgacgaaaatgtggagtcacctggaacggcaggctggaggtcaagttaagggtatgggtgagaagcaaattgaagttgacaagcgcatcttgagaactcaaataagtgccttgaggaaagaattggaatctgtacggaaacaccgaaagttgtaccgcaaccgtcgccaatcagttcctattcctgttgtttctctggtaggatatacaaatgctggaaaaagtacactcctgaaccgcttaactggagctgatgtgcttgcagaggataagttatttgccacattagatccaactactagaagggttttgatgaagaatgggactgagttccttctaactgataccgtcggattcattcagaaattacccactatgctggtagcagcatttagagcaacactagaagagatatcggaatcatcagttatagttcatcttgtggacattagccatcctttagctcaacaacagatagatgctgttgaaagagtactgaaggagttggatgtcgagtcaatccccaaattagtcgtgtggaataagattgacaatacggatgaaccattgagtgtaaaagaggaggctcagaaacaaggaataatctgcatatcagcgatgaatggtgatggtttggaagatttatgtaatgcagttcaagcaaagttgaaagactcgatggttcctatagaagcttttgtcccatatgacaaaggagatctcctgaatgacatacataaggttggaatggttgaaaaaatggagtacaaggaaagtgggacatttgtaaaagctcatgtgcctctacctctggcaaggcttctcacacctctacggcagcaggtggcagccactgtgtgatgtgcatgtccccgatcccttgatgccattggcactcacaaaattaccacatcttgtagattcacaaaaggaatagctttgctgtagaaaacttaatcatagattatcttcattgtgtttctacggttctaccagagtaccgtatcaacaggtgcacaggactagatagctgtatgtacgcacaacagaaatgtaaatgttctcagcagaatttaagccccgtttggtttgggtagtcacttttagtccctaaaaatataaacatggtgactaaaatagggtaactaaatttaagttctttagtcaaaaaaaaaaaaaaaaa

SEQ ID NO: 10132 - protein, 552 aa, Zea mays
  misc_feature: Ceres CLONE ID no. 1595880
  misc_feature: Ceres CDNA ID no. 35383467
  misc_feature (330)..(449): Pfam Name: Dynamin_N PFAM Desc: Dynamin family
  misc_feature: Homolog of GI Number: 77551765 NR Desc: GTP binding protein
  misc_feature: Homolog of GI Number: 9758365 NR Desc: GTP binding protein
  misc_feature: Homolog of GI Number: 53799322 NR Desc: COG2262: GTPases
  misc_feature: Homolog of GI Number: 51893261 NR Desc: ATP/GTP
  misc_feature: Homolog of GI Number: 72161224 NR Desc: Small GTP
  misc_feature: Homolog of GI Number: 68233604 NR Desc: Small GTP
  misc_feature: Homolog of GI Number: 15842263 NR Desc: GTP
  misc_feature: Homolog of GI Number: 15609862 NR Desc: hflX
  misc_feature: Homolog of GI Number: 76783200 NR Desc: COG2262: GTPases
  misc_feature: Homolog of GI Number: 81253284 NR Desc: COG2262: GTPases
MSAAACLFAAAVSLSFPSTSAPSSARRRRLRSPTTLLRCSPTRRRGPVRRTLDERLLEAAPAETEDVQTAVDVEDGGGIAEGDEVGTEEMEELEQRPPTRAFVKSRRQRQEEEEAAAGQDRFKLINGKEIFQEKAYLVGVECKRTGGNLFGIEESLKELEQLADTAGLLVVGSTYQKLSTPNPRTYIGSGKVSEIRTAIQALDVETVILDDELSPGQLRNLEKSFGGSVRVCDRTALILDIFNQRAATHEASLQVTLAQMEYQLPRLTKMWSHLERQAGGQVKGMGEKQIEVDKRILRTQISALRKELESVRKHRKLYRNRRQSVPIPVVSLVGYTNAGKSTLLNRLTGADVLAEDKLFATLDPTTRRVLMKNGTEFLLTDTVGFIQKLPTMLVAAFRATLEEISESSVIVHLVDISHPLAQQQIDAVERVLKELDVESIPKLVVWNKIDNTDEPLSVKEEAQKQGIICISAMNGDGLEDLCNAVQAKLKDSMVPIEAFVPYDKGDLLNDIHKVGMVEKMEYKESGTFVKAHVPLPLARLLTPLRQQVAATV

SEQ ID NO: 10133 - DNA, 2753 bp, Zea mays
  misc_feature: Ceres CLONE ID no. 1596371
  misc_feature: Ceres CDNA ID no. 40041499
  CDS (96)..(2522): REFERENCED BY SEQ ID NO: 10134
aatgcttcggcagccccgtctaaatctcctattcatcgcgcaggtgccgccggcgtcgccgtcgccgccgccccagcccctagctgccggcgaacatgtctgagcaggcaccaccttacgctcccttctccctggtctcttcccttgccccagagcctagctctaccccgtcaccgaaccccacccttgtcctccccagtcctgccttccccaacaagcgcaagcgcaccggattccgccgcaaagtaccctccggggcccctgccgctcccgccccctccctcgtggccccctcccagccccctctccccgcctccgctgccgacgatatcatagtgattaaccgggagccgaccgcggaggccgtcaccgcgctcaccgccggcttcccggcggattcgctcactgacgaggagatcgaggcgggcgttgtatccgacgtgggtggcatcgagcaggtcaattacatcctcatccgcaaccacctcctctgccggtggcgcgagacctacaattcctggctcgccaaggagcccttcgcaatgctcatccctccccactgcgagcacctcctcaccgccgcctactccttcctcgtctcaaatagctacgtcaatttcggcgtcgccccagccatcaaggagcgaatccccaaggagcccacgagaccctccaccgttgtcgttgtaggtgctggccttgctgggctagctgcggcacggcagctggtggcgttcgggttcaaagtgatcgtcctggaaggtcgcaaaaggtgcggtgggcgtgtgtacacgaagaagatggaaggcggtgggcgcttggctgctgctgacctcggcggcagcgtgctcacagggacatttggaaacccgctaggaattgtggcgaagcaactcggcttgccaatgcacaaaattagagacaagtgtccactctacaggccggatggctcaccagttgatccagaggtggataagaaagtggagattacatttaaccggcttcttgacaagtcaagcaacctgcgagcatccatggggaaggtggctgcggatgtttcacttggggcggccctagagacattgcgccaggttgatgggggcatctctacagaggaggatatgaacttgttcaattggcatctcgcaaatcttgagtatgccaatgcaggattgctgtctagactaagccttgcgttctgggatcaggatgatccatatgacatgggtggggatcactgcttcttgcctggtggcaatggcaaacttgtgcaggccctggcagagaatgtaccgattgtttatgagaggacggtgcacaccataaggtatggaggggatggggtgcaggtagttgtcaatggagggcaggtgtatgagggcgacatggcattgtgcacggttccacttggggttctgaaaaatggaggcatcaagtttgtacctgagttaccacaaaggaagcttgattgtatcaagaggcttggatttggtttgttgaacaaggtatcgatgctgtttccacatgttttctggagtactgaccttgatacctttgggcatctggttgaagatccgaggcggcgcggggagttctttttgttctatagctatgcaacagtggctggtggtccattgttgatggccttggttgctggtgaagctgcccacaattttgaaacaatgccaccaactgatgctgtcagctcagttctccagatactaagaggtatctatgaaccacaagggattgaggtgccggaccctctacagagtgtttgtactagatggggcactgactcgttcagtctaggctcatactctcatgttgctgtgggggcctctggagatgactatgacgcattagccgaaagtgttggtgatggccgtcttttctttactggtgaggctaccacgaggcgttatccagcgacaatgcatggtgcttttatcagtggtttgcgggaggctgctaacatcacgctgcatgccaatgcccgggcgacaaagagtaaagtagacagaagtccatcgacaaacacacaggcttgtgctgctacattaacggacttgtttaggcaacctgatttggagtttggaagcttctcggttatttttggaggaaaagcttctgatccgaaatccccagctattctgaaggtggaattaggtgcgtcgcgaaagaaaaatacagccgaaggggtaaagacggaacagaaccactcaaacaaattgttgtttcagcagctccagtcacactttaaccaacaacaacagctttatgtttacacattgctatcacgacagcaagctatggagttaagggaggtcagaggaggcgatgacatgaggttgcactacctctgtgaaaaactgggggtgaaattagttggcaggaaaggccttggccctggggcagatgctgtgattgcatccattaaggcagaacgtaacagaagtcgaactagacctggcccctcaaaactgaaaaaatctctgaagcccaatgttgctgcgtcatgaccactgattgctgatttctcttgggacctgactgcctttaactgatgaaggtgttcatttggttggagcatatgttggtgtgtgctggccaatttgcattggacattcgccaattgttttaggacaaagtagatttggatgaaatctcctagatcctgtaatttcctccgtttcttttgggtgccagaagaaggcatttgtaatgtcacatctcaaaaaaaaaaaaaaaaa

SEQ ID NO: 10134 - protein, 808 aa, Zea mays
  misc_feature: Ceres CLONE ID no. 1596371
  misc_feature: Ceres CDNA ID no. 40041499
  misc_feature (195)..(222): Pfam Name: Thi4 PFAM Desc: Thi4 family
  misc_feature (83)..(175): Pfam Name: SWIRM PFAM Desc: SWIRM domain
  misc_feature: Homolog of GI Number: 23505983 NR Desc: At1g62830/F23N19_19
  misc_feature: Homolog of GI Number: 6630454 NR Desc: F23N19.18
  misc_feature: Homolog of GI Number: 50927913 NR Desc: OSJNBa0084K11.6
  misc_feature: Homolog of GI Number: 61661322 NR Desc: flowering locus D
  misc_feature: Homolog of GI Number: 50941045 NR Desc: putative peroxisomal N1
  misc_feature: Homolog of GI Number: 50912911 NR Desc: putative polyamine oxidase
  misc_feature: Homolog of GI Number: 50941043 NR Desc: putative polyamine oxidase isoform
  misc_feature: Homolog of GI Number: 37589595 NR Desc: Amine oxidase
  misc_feature: Homolog of GI Number: 60502444 NR Desc: Amine oxidase
  misc_feature: Homolog of GI Number: 58761546 NR Desc: amine oxidase
MSEQAPPYAPFSLVSSLAPEPSSTPSPNPTLVLPSPAFPNKRKRTGFRRKVPSGAPAAPAPSLVAPSQPPLPASAADDIIVINREPTAEAVTALTAGFPADSLTDEEIEAGVVSDVGGIEQVNYILIRNHLLCRWRETYNSWLAKEPFAMLIPPHCEHLLTAAYSFLVSNSYVNFGVAPAIKERIPKEPTRPSTVVVVGAGLAGLAAARQLVAFGFKVIVLEGRKRCGGRVYTKKMEGGGRLAAADLGGSVLTGTFGNPLGIVAKQLGLPMHKIRDKCPLYRPDGSPVDPEVDKKVEITFNRLLDKSSNLRASMGKVAADVSLGAALETLRQVDGGISTEEDMNLFNWHLANLEYANAGLLSRLSLAFWDQDDPYDMGGDHCFLPGGNGKLVQALAENVPIVYERTVHTIRYGGDGVQVVVNGGQVYEGDMALCTVPLGVLKNGGIKFVPELPQRKLDCIKRLGFGLLNKVSMLFPHVFWSTDLDTFGHLVEDPRRRGEFFLFYSYATVAGGPLLMALVAGEAAHNFETMPPTDAVSSVLQILRGIYEPQGIEVPDPLQSVCTRWGTDSFSLGSYSHVAVGASGDDYDALAESVGDGRLFFTGEATTRRYPATMHGAFISGLREAANITLHANARATKSKVDRSPSTNTQACAATLTDLFRQPDLEFGSFSVIFGGKASDPKSPAILKVELGASRKKNTAEGVKTEQNHSNKLLFQQLQSHFNQQQQLYVYTLLSRQQAMELREVRGGDDMRLHYLCEKLGVKLVGRKGLGPGADAVIASIKAERNRSRTRPGPSKLKKSLKPNVAAS

SEQ ID NO: 10135 - DNA, 2084 bp, Zea mays
  misc_feature: Ceres CLONE ID no. 1597118
  misc_feature: Ceres CDNA ID no. 35383468
  CDS (416)..(1774): REFERENCED BY SEQ ID NO: 10136
agtggcggcagcttggaaccggtcgtcctcctccctccccgtcgctcccgacctcttcctcctcctaatttaatcccacccggcctccccgttctccccgaccgcatccccccttaacctcccttcctcctcctcctcctgcggtcccaactcccatacttcggttcaggaggcaggcaggcaggaaggcaggttcgaggggggattggctccgctcctgctccattgcgcgcgatccggctcgttcttgtgatctgtctagccgtttcttgggtcagtgctggaaggtcaaactgttggtggaaacctcaccggggtgcttcaacgaacgcgaaggtgtcgctgtcatttagcgcgtcttgattggatttgacctgttggcctggtggcgtgttgtcgttgattgagctcgaggatgatgaaatgggggctcagcagcggcacgcccgcggattcctactacgaggtacggtcagattgcacggacggtgtgcccaagagcaagttcaagatcaaggctggcaaaacattaagtgctcggaaatggcaggctgcatttagtcccgatggctgtcttgatattgcctcagtcctaagccggatacaaagaggaggtgtccatccgacagtcagaggagaggtctgggaattcttacttggttgtttcgatcccagaagtacctttgatgaaagggaagagatcaggcaaatacggaggatacaatatgacagatggaaggaagattgtcgacagatggattcgcatgttggtagcggtaaagttatcacagcaccacttatcactgaggatggcagacctattaaggatcctctggttttacttgaggctactgccgacaaggacacttcagaagttgctccatctaccagtataaatggaaatgaaattgatgaatctgcagaacgcattaccgataaacaaattatcgagtggaagctgacattgcatcaaattgggcttgacgttttacgcactgatcgtaccatggtattttatgagaacaaagaaaatctttccaaattatgggatattctagccgtgtatgcatggattgacaaagatgttggttactgccaaggaatgagtgatttatgctcaccaatgatagttctactaaaggatgaagcagatgccttttggtgctttgagaaattgatgcgtagattgcgaggaaatttcaaatgcacagatcaatctgtgggagtatccaaccaacttcaacatcttgcatctattattcaggttcttgacccaaagctacatgaccacctagaaactcttggcggaggtgactacctttttgcgttccgaatgttcatggtgctatttaggcgtgaagtatcatttggagactccttatacctctgggagatgatgtgggctctagaatacgaccctgacattttcttcgcaacatgcgaagaacaaggtgcagtacataaaaataaagtttctaaatccaaactgaaaggactgcgccattttggcaagtgggataaggacaaggataaggaagatgataagaatggggctgaggacggtgaagatggtccggttccgatttcagtcttcatggttgcaagtgtcctcaaggagaagagagaaaagctgttacaagaagccagaggactggatgatcttatcaggatattgaacgatgtaaatgggaacttagatgctaagaaagcttgcgctggagcattgaaacttcacaaaaaatacctgaaaaaggtacaagcaaagaaaccttaaacgtgccatggaacacacgtccccaatggggctatcgttaccatttcaacatacacgaccattttctacacacaactttgagtgaagatttatctgacacaggtggtaatcgtctgacatgtcctgagatacacggagactgatggtgccaggctagtgggttgagtacaggatgagcgcaaccggtagtgtgtatatcacgttctttgtactcaagaattttgtacagacagaaggcggtgcggatagcatgccttgcatacataataatttcaatacaggttgaaaacttgaaaaaaaaaaaaaaaaa

SEQ ID NO: 10136 - protein, 452 aa, Zea mays
  misc_feature: Ceres CLONE ID no. 1597118
  misc_feature: Ceres CDNA ID no. 35383468
  misc_feature (65)..(82): Pfam Name: TBC PFAM Desc: TBC domain
  misc_feature: Homolog of GI Number: 50508504 NR Desc: GTPase activating protein
  misc_feature: Homolog of GI Number: 77551667 NR Desc: TBC domain
  misc_feature: Homolog of GI Number: 42569183 NR Desc: RabGAP/TBC domain
  misc_feature: Homolog of GI Number: 42567218 NR Desc: RabGAP/TBC domain
  misc_feature: Homolog of GI Number: 50915740 NR Desc: putative GTPase activating protein
  misc_feature: Homolog of GI Number: 45773936 NR Desc: At2g20440
  misc_feature: Homolog of GI Number: 55769623 NR Desc: putative GTPase
  misc_feature: Homolog of GI Number: 34893986 NR Desc: P0672D08.1
  misc_feature: Homolog of GI Number: 9757939 NR Desc: GTPase activator protein of Rab
  misc_feature: Homolog of GI Number: 51971014 NR Desc: GTPase activator protein of Rab
MMKWGLSSGTPADSYYEVRSDCTDGVPKSKFKIKAGKTLSARKWQAAFSPDGCLDIASVLSRIQRGGVHPTVRGEVWEFLLGCFDPRSTFDEREEIRQIRRIQYDRWKEDCRQMDSHVGSGKVITAPLITEDGRPIKDPLVLLEATADKDTSEVAPSTSINGNEIDESAERITDKQIIEWKLTLHQIGLDVLRTDRTMVFYENKENLSKLWDILAVYAWIDKDVGYCQGMSDLCSPMIVLLKDEADAFWCFEKLMRRLRGNFKCTDQSVGVSNQLQHLASIIQVLDPKLHDHLETLGGGDYLFAFRMFMVLFRREVSFGDSLYLWEMMWALEYDPDIFFATCEEQGAVHKNKVSKSKLKGLRHFGKWDKDKDKEDDKNGAEDGEDGPVPISVFMVASVLKEKREKLLQEARGLDDLIRILNDVNGNLDAKKACAGALKLHKKYLKKVQAKKP

SEQ ID NO: 10137 - DNA, 2119 bp, Zea mays
  misc_feature: Ceres CLONE ID no. 1597138
  misc_feature: Ceres CDNA ID no. 40041500
  CDS (231)..(1838): REFERENCED BY SEQ ID NO: 10138
agtccagaattcgtggactcgcccccgctccgccccagctcacacgccaagtcccagtacaaagcctacggaatttccccccacctccaattcgagttgtccgcttccagtcagtcgccgccgccgccgtcgccgctgaaaccgaaacttgaaaaaccagctcgccgggggtccggccgatttcccccaaatttccctgctgctgctgataggaggccgcggcgaccaccatgggcaactgctgcgccacgccgtcgacgacggaggagagcggcaagagccgccagaagaagccgaagcagaagacgaacccctacaacgtggcgtacaaccgcggggcggcgccggcgccggcgcgcccgggcctggtggtgctgcgggacccgacggggcgggacctcggcgcgcagtacgagctgggcggcgagctgggccgcggcgagttcggcgtcacgtacctgtgcacggagtccgccacgagggcgcgctacgcgtgcaagtccatctccaagcgcaagctgcgcacacccgtggacgtggaggacgtgcgccgggaggtggacatcatgcgccacatgcctccgcaccccaacatcgtcagcctccgcgccgcctacgaggacgaggacgccgtgcacctcgtcatggagctctgcgagggaggcgagctcttcgacaggatcgtcgcccggggccactacaccgagcgtgccgccgccgccgtcacgcgcaccatcgtcgaggtcgtccagatgtgccacaggcatggcgtcatgcaccgggatcttaaaccagagaactttttatatgcaagcaagaaggagagttcccctctgaaagcaatcgattttgggctgtcagtgttcttcaggcctggtgagcgatttactgaaatcgtaggcagtccatactacatggctccagaggttctaaagcgaaactatggccctgaagttgatgtttggagtgctggagtgatactttacatacttctctgtggtgtaccaccattttgggcagaaactgaacagggagtagcacaggcaattatacgatctgtggtagatttcaaaagagaaccatggcccagagtatctgagcctgctaaagatcttgtcaggcggatgctggacccaaatccattgacacggtttactgcagcacaagtacttgagcatccatggttacatgactctaaaaagatgccagacatttctcttggtgatactgtccgagcaagactgcaacaatttgctgcgatgaacaagttaaagaagaaagcattaagggtgattgccgagcatctgtcagtggaggaagtagctgacataaagcaaatgtttgacaagatggacgtgagcaagaatggcaagctaacattcgaggaattcaaggcgggccttcgtaaactggggaaccaaatgcctgattcagatcttcagatattgatggatgccgctgacatcgataaaaacgggaccctagattacgaggaattcgtcaccgtgtctgttcatgtgagaaaaataggcaacgatgagcacatccaaaaggccttcacatacttcgaccggaacaagagcgggtacatagagatcgaagagcttagagaggcactggctgatgaactggagggaaccgatgaggacatcatcaatggcatcatccgagacgtggacacggataaggacgggaaaataagctacgacgagttcgcggcgatgatgaaggccggcactgactggaggaaggcatcacggcagtactcgaggcagcggttcagcaacctgagcctgaagcttcagaaggacgggtccctcggcgccgagacacggtaggcgggggccggccaccgcctaccgccacccgacggagaagtgatctgagtgttcgtcgagctgtagtcaggtgattcgattccacgcacgttccattttacacggtgaatcttcagtcgagcttgtagtttcttgggtttgtgattgtaaagatggtggttgtgcttgtgcccgtacgtactgtagatgcagcagcgtgtacctacacaatttacatttacagagaaaatgcatgctggagtagcacaagtagtcttgctttgtaaaaaaaaaaaaaaaaa

SEQ ID NO: 10138 - protein, 535 aa, Zea mays
  misc_feature: Ceres CLONE ID no. 1597138
  misc_feature: Ceres CDNA ID no. 40041500
  misc_feature (402)..(430): Pfam Name: efhand PFAM Desc: EF hand
  misc_feature (61)..(319): Pfam Name: Pkinase PFAM Desc: Protein kinase domain
  misc_feature: Homolog of GI Number: 17386100 NR Desc: AT4g23650/F9D16_120
  misc_feature: Homolog of GI Number: 13605617 NR Desc: AT5g19450/F7K24_200
  misc_feature: Homolog of GI Number: 45773914 NR Desc: At3g57530
  misc_feature: Homolog of GI Number: 29028976 NR Desc: At5g04870
  misc_feature: Homolog of GI Number: 79607733 NR Desc: CPK29
  misc_feature: Homolog of GI Number: 50948895 NR Desc: ESTs C22369
  misc_feature: Homolog of GI Number: 37726923 NR Desc: IPK
  misc_feature: Homolog of GI Number: 50927919 NR Desc: OSJNBa0084K11.9
  misc_feature: Homolog of GI Number: 23306121 NR Desc: Putative calcium dependent protein kinase
  misc_feature: Homolog of GI Number: 71492979 NR Desc: calcium dependent kinase 5
MGNCCATPSTTEESGKSRQKKPKQKTNPYNVAYNRGAAPAPARPGLVVLRDPTGRDLGAQYELGGELGRGEFGVTYLCTESATRARYACKSISKRKLRTPVDVEDVRREVDIMRHMPPHPNIVSLRAAYEDEDAVHLVMELCEGGELFDRIVARGHYTERAAAAVTRTIVEVVQMCHRHGVMHRDLKPENFLYASKKESSPLKAIDFGLSVFFRPGERFTEIVGSPYYMAPEVLKRNYGPEVDVWSAGVILYILLCGVPPFWAETEQGVAQAIIRSVVDFKREPWPRVSEPAKDLVRRMLDPNPLTRFTAAQVLEHPWLHDSKKMPDISLGDTVRARLQQFAAMNKLKKKALRVIAEHLSVEEVADIKQMFDKMDVSKNGKLTFEEFKAGLRKLGNQMPDSDLQILMDAADIDKNGTLDYEEFVTVSVHVRKIGNDEHIQKAFTYFDRNKSGYIEIEELREALADELEGTDEDIINGIIRDVDTDKDGKISYDEFAAMMKAGTDWRKASRQYSRQRFSNLSLKLQKDGSLGAETR

SEQ ID NO: 10139 - DNA, 1775 bp, Zea mays
  misc_feature: Ceres CLONE ID no. 1597530
  misc_feature: Ceres CDNA ID no. 40352059
  CDS (178)..(1635): REFERENCED BY SEQ ID NO: 10140
accttcctggagccgctggagctccgacccagaattccactcgcgtcctctcccgccaaggtcgctactgtacagtacagtccagccccgaaatctgtccactcgttcgcaacccagtccggcgggcccgagtggctctcgtcggctccaagaagctcgcaccgtggtcgtgggcggatggcggcggcggcgctggcggtgctgctgtgcgcctgcgcggcgtggccggcgacggcgctgggggtgaactggggcacgcaggcgacgcacccgctgccgcccaaggccgtggtgcaggtgctccgggacaacggcatcaagaaggtgaagctgttcgacgccgaccccgccgccatgcgcgcgctcgccggcaccggcatcgaggtcatggtcgccatccccaacgccatgctcgcgggcctcgccgccgacgccggccaggccagggactgggtcaagcgcaacgtcaggcgctacgacttcgacggcggcgtcaccatcaagtacgtggctgtcggcaacgagccgttcctcgagtcgtacaacgggtccttcatcaacgtcacgctcccggcgctgcagaacgtccagaacgcgctgaacgacgccgggatcggcgaccggatcaaggcgaccgtgccgctgaacgccgacgtgtacaactccccccggagcaacccggtgccgtcggcggggcggttccgcgccgacatcgcggggctgatggcggacatggtgaggttcctggctcggaacggcgcgcccttcaccgtgaacatctacccgttcctgagcctgtacctgaacgagcacttcccgctggactacgccttcttcgacggcggcgcggcgccagtggacgaccacggcgtgctgtacaccaacgtgttcgacgccaacttcgacacgctggtggcggcgctgggggccgtggggcacggcgacatgccggtggtcgtgggcgaggtggggtggcccacggacggcgacaggcacgccaaggcgtcctacgcgcagcgcttctacgcgggcctgctgcggcggctggcggcgaacgccggcacgccggcgaggccgggccagcgcccggcggaggtgtacctgttcgggctcgtcgacgaggacgccaagagcgtcgcgccgggcaacttcgagcgccactggggcgtgctgcggtacgacggccagcccaagttcgccatggacctcacggggcagggccgggacacgacgctggtgccggcgcgcggcgtggcgtacctgtccaggacgtggtgcgcgctgaaccccagagccaaggacctcggcaggctcggcgccaacgtcgactacgcctgcacgttcgccgactgcacgccgctggggtacggctccacgtgcggcggcatggacgtcgccggcaacgcgtcgtacgcgttcaacgcgtactaccaggcgcagaaccagaaggacgaggcctgcgacttccagggcctcgcgctgcccaccgagaccgacccctccaccgccacctgcaacttcaccatacagatccagacgggggcggcggccatggcgtcgctcggccggagcgctggcgccgccgcgctggtgctggcgtcggcgtcgctgcagctcctggcgcagttgtggtagcagctggttttgtgtggatgtgcgtgctggcaagaagatcaacgtcgtgtacggttggttgattgattctgtgcatttttttatcatccaaaacatgtttttttatatataatttggaccggagtaaaaaaaaaaaaaaa

SEQ ID NO: 10140 - protein, 485 aa, Zea mays
  misc_feature: Ceres CLONE ID no. 1597530
  misc_feature: Ceres CDNA ID no. 40352059
  misc_feature (21)..(344): Pfam Name: Glyco_hydro_17 PFAM Desc: Glycosyl hydrolases family 17
  misc_feature (365)..(448): Pfam Name: X8 PFAM Desc: X8 domain
MAAAALAVLLCACAAWPATALGVNWGTQATHPLPPKAVVQVLRDNGIKKVKLFDADPAAMRALAGTGIEVMVAIPNAMLAGLAADAGQARDWVKRNVRRYDFDGGVTIKYVAVGNEPFLESYNGSFINVTLPALQNVQNALNDAGIGDRIKATVPLNADVYNSPRSNPVPSAGRFRADIAGLMADMVRFLARNGAPFTVNIYPFLSLYLNEHFPLDYAFFDGGAAPVDDHGVLYTNVFDANFDTLVAALGAVGHGDMPVVVGEVGWPTDGDRHAKASYAQRFYAGLLRRLAANAGTPARPGQRPAEVYLFGLVDEDAKSVAPGNFERHWGVLRYDGQPKFAMDLTGQGRDTTLVPARGVAYLSRTWCALNPRAKDLGRLGANVDYACTFADCTPLGYGSTCGGMDVAGNASYAFNAYYQAQNQKDEACDFQGLALPTETDPSTATCNFTIQIQTGAAAMASLGRSAGAAALVLASASLQLLAQLW

SEQ ID NO: 10141 - DNA, 2198 bp, Zea mays
  misc_feature: Ceres CLONE ID no. 1597706
  misc_feature: Ceres CDNA ID no. 25447234
  CDS (198)..(2009): REFERENCED BY SEQ ID NO: 10142
aatccccgtttcaattcccttcactccccgaagtccccactccccactcccccaaagctctctctctacctccctccctccccctcttccgaggcttctcctttccgccatggcctcctgctagtgtcagctcccgtcgcaacgcctcccagatcccggacgcagcgtgccgcaccccgcgacggccggctcgcgacatgggagggtgtcacgcgaagccgctcacccacgacgcggaccgctcgccgccgcacgcagcgccggcgaccccgcccccgggctccgccacgcccgccacccccggccccgggaagaagcactgggcggtgtccccgttcttcgcgttctccacgccgagcccgagccccgcgcaccacctcttcggcggctccgcggcatcgccgcgcaagtcccccgctccgccgggctccgcgcccaccaccccggccaggcggctcctgaggctgcccttcccgccgccgtcgcccgccaagcacatccgggcggcgctcgccaggcgccacggcccgccgcggccgtctatccccgaggaaggcagcggcgagggggagggcggcggcggcggcggaggcaggggcctcgacaaggggtttgggttcaacaaggggtttgcggctaagtatgacttgggggatgaggtcggacgggggcacttcggctacacctgcgccgccactgttaagaagggcgcgcgcaagggggagtccgtggccgtcaaggtcatccccaaagcaaagatgactacatccattgctatagaggatgtccgaagggaggttaaaatcttgaaagctttagcaggaaacaaaaacttggtccaattttatgatgcctacgaggacaacgacaacgtgtatatagtaatggagttgtgcgaaggtggagagctacttgacagaatactttccagaggcgggaagtactccgaggatgatgcaaaagctgtcctggtgcaaatattaaatgtcgtcgctttttgccacattcaaggagtggttcatcgagatctcaaaccagagaattttctttttacatcaaaagatgatgattcccatcttaaggccattgattttggcctatcagactttgtaaaaccagatgagaggctcaatgacatagttggaagtgcttattatgttgctccagaagttctgcatagatgctatagcacagaagctgatgtttggagcataggtgtaattgcatatatccttctttgtggcagtcgtccattttgggcacgcacggaatctggtatattccgttcggttctcaaagccgatcccagttacaatgaggcaccatggccttctctgactccggaagcaatggattttgtcaagcgattgctgtgcaaggatccgcgtagaaggatgactgcagctcaggctttaagtcatccgtggatcagaaattataatgacattaagctgccgttggacattcttatattccgacttatcaaagcttatattcgctcctcatctttacggaaagctgctctgagggctctgtcaaagaccttaaccgtagacgagcttttctacctgaaatcacagttttctctattggaaccagacaggaatggatgcatcactcttgacaatatcagaatggccttaacgagagaagctactgatgcaatgaaggaatcgcgagttcaagatattcttgtttcgttgagcgcccttcagtacagaagaatggaattccaagagttctgtgcagcagcagttagtgtgcatcagcttgaagcattggatagatgggagcaacatgcgagatctgcttatgaacattttgagaaggaaggcaaccgagctattgtaatagatgaattagcttctgaattgggcctcagcccttcagtgccactgcatgtcgttctgcaagattggatcaggcatacggatgggaaattgagctttctcggatttgtcaagttgttgcatggcatgtccagcaggtccctgtcaaagatgagatagctgttgataatctctaacgacagtgcatgcttacaccgccttagcccttgtcgacttggttcgtgggttggagcttgtgtatcaagggcgtatctagcagcacctgatctgtcactaatttcagtatagagttatgtttgttgttgcctgcctactgatcattagccgataggaaaaaaaaaaaaaaaa

SEQ ID NO: 10142 - protein, 603 aa, Zea mays
  misc_feature: Ceres CLONE ID no. 1597706
  misc_feature: Ceres CDNA ID no. 25447234
  misc_feature (322)..(341): Pfam Name: Pkinase_Tyr PFAM Desc: Protein tyrosine kinase
  misc_feature: Homolog of GI Number: 37202008 NR Desc: At1g49580
  misc_feature: Homolog of GI Number: 6561993 NR Desc: CDPK
  misc_feature: Homolog of GI Number: 2154715 NR Desc: CDPK
  misc_feature: Homolog of GI Number: 1103386 NR Desc: CDPK
  misc_feature: Homolog of GI Number: 14133874 NR Desc: CaMK1
  misc_feature: Homolog of GI Number: 9294612 NR Desc: calcium
  misc_feature: Homolog of GI Number: 45550245 NR Desc: calcium/calmodulin protein kinase
  misc_feature: Homolog of GI Number: 16904226 NR Desc: calcium/calmodulin
  misc_feature: Homolog of GI Number: 50939305 NR Desc: putative CDPK
  misc_feature: Homolog of GI Number: 55741110 NR Desc: putative CDPK
MGGCHAKPLTHDADRSPPHAAPATPPPGSATPATPGPGKKHWAVSPFFAFSTPSPSPAHHLFGGSAASPRKSPAPPGSAPTTPARRLLRLPFPPPSPAKHIRAALARRHGPPRPSIPEEGSGEGEGGGGGGGRGLDKGFGFNKGFAAKYDLGDEVGRGHFGYTCAATVKKGARKGESVAVKVIPKAKMTTSIAIEDVRREVKILKALAGNKNLVQFYDAYEDNDNVYIVMELCEGGELLDRILSRGGKYSEDDAKAVLVQILNVVAFCHIQGVVHRDLKPENFLFTSKDDDSHLKAIDFGLSDFVKPDERLNDIVGSAYYVAPEVLHRCYSTEADVWSIGVIAYILLCGSRPFWARTESGIFRSVLKADPSYNEAPWPSLTPEAMDFVKRLLCKDPRRRMTAAQALSHPWIRNYNDIKLPLDILIFRLIKAYIRSSSLRKAALRALSKTLTVDELFYLKSQFSLLEPDRNGCITLDNIRMALTREATDAMKESRVQDILVSLSALQYRRMEFQEFCAAAVSVHQLEALDRWEQHARSAYEHFEKEGNRAIVIDELASELGLSPSVPLHVVLQDWIRHTDGKLSFLGFVKLLHGMSSRSLSKMR

SEQ ID NO: 10143 - DNA, 1967 bp, Zea mays
  misc_feature: Ceres CLONE ID no. 1598714
  misc_feature: Ceres CDNA ID no. 35383469
  CDS (313)..(1656): REFERENCED BY SEQ ID NO: 10144
aagctctccaccaagagcttgtaccccacaccactaggcactagtccactacctaacgctacctgccttttcaccgcgtcgtgcgctaccgccacgttgagctcgcgtccgtcccagatccgccgtgctcctccatcgctcgcgcaaggttggttgctggcctcgcctgctcgcctttccttcaactccttcccgccttgcaggatttgggctttctcgatcacgaggcgctccggtaggtcggagtgggggggatcatcaatcaatccggttgcgtacgaacgataacgcggtgtgtcgcgtcgcgtgcagatgaagatcacggtgcgggggtcggagatggtgtacccggcggcggagacgccgcgccgccgcctctggaactcgggccccgacctggtggtgccgcggttccacacgcccagcgtctacttcttccgccgcgaggacgcggacgggaacgacctggcgggcgcggacgggagcttcttcgacggggcgcggatgcggcgcgcgctggccgaggcgctggtgcccttctacccgatggccggccggctggcgcgcgacgaggacggccgcgtcgagatcgactgcaacgcgggcggggtgctgttccaggaggcggacgcgcccgacgccaccatcgactactttggcgacttcgcgcccaccatggagctcaagcgcctcatccccaccgtcgacttcacggacgacatctcctccttcccgctgctcgtgctccaggtgacccacttcaagtgcggtggcgtggctatcggcgttggcatgcagcaccacgtagccgacggcttctccggcctgcacttcatcaactcgtgggcggacctctgccgcggcgtcccgatcgccgtcatgcccttcattgaccgctcgctcctccgcgcgcgcgatccgccgaccccggcctacccgcacatcgagtaccagccggcgcccgccatgctatcctctgagccgccacaggcggccctcacgtccaagccggcgacgccgcccacagccgtggctatcttcaagctctcccgcgccgagctcgtccgcctccgttcgcaggtccccgcgcgcgagggcgcgccgcggttcagcacgtacgctgtgctggcggcgcacgtgtggcggtgcgcgtccctggcgcgcggcctgccggccgaccagcccaccaagctgtactgcgccacggacgggcggcagcggctgcagccgccgcttccggagggctacttcggcaacgtgatcttcacggcgacgccgctggccaacgccggcacggtgacggccggggtggcagagggcgcgtccgtgatccaggccgcgctggaccggatggacgacgggtactgccggtcagcgctggactacctggagctgcagccggacctgtcggcgctggtccgcggggcgcacacgttccggtgccccaacctggggctcaccagctgggtgcgcctgcccatccacgacgcggacttcgggtgggggcggcccgtgttcatgggccccggcggcatcgcctacgaggggctcgcgttcgtgctccccagcgccaaccgcgacggcagcctgtccgtggccatctcgctgcaggcggagcacatggagaagttccggaagctcatctacgacttctgatctccaactcctccccacaagtcatcagtaccagtacgcgcaacacaaagaagcaagagaccgttgggagtaggttgcagcaatattctttgatttcacacatagttcctgcacacttttccgttcctgcctgccccctttgggcagggcgcataccttttgtgctgaattatttacgagcccctgcaattgtatgatgaatgaacaatttaatccgttctgaatgatacagattaataagattaattaacttatctctaaaaaaaaaaaaaaaaaaaaaaaaaaaaaaaaaaaaaaaaaaaaaaaaaaaa

SEQ ID NO: 10144 - protein, 447 aa, Zea mays
  misc_feature: Ceres CLONE ID no. 1598714
  misc_feature: Ceres CDNA ID no. 35383469
  misc_feature (1)..(447): Pfam Name: Transferase PFAM Desc: Transferase family
  misc_feature: Homolog of GI Number: 82568711 NR Desc: Alcohol acyl
  misc_feature: Homolog of GI Number: 50926145 NR Desc: OSJNBa0029H02.14
  misc_feature: Homolog of GI Number: 70663907 NR Desc: OSJNBa0029H02.19
  misc_feature: Homolog of GI Number: 21536883 NR Desc: anthranilate N
  misc_feature: Homolog of GI Number: 10177182 NR Desc: anthranilate N
  misc_feature: Homolog of GI Number: 32400291 NR Desc: hydroxyanthranilate hydroxycinnamoyltransferase 1
  misc_feature: Homolog of GI Number: 32400293 NR Desc: hydroxyanthranilate hydroxycinnamoyltransferase 2
  misc_feature: Homolog of GI Number: 32400295 NR Desc: hydroxyanthranilate hydroxycinnamoyltransferase 3
  misc_feature: Homolog of GI Number: 27475616 NR Desc: hydroxycinnamoyl transferase
  misc_feature: Homolog of GI Number: 50910387 NR Desc: putative hydroxyanthranilate hydroxycinnamoyltransferase 3
MKITVRGSEMVYPAAETPRRRLWNSGPDLVVPRFHTPSVYFFRREDADGNDLAGADGSFFDGARMRRALAEALVPFYPMAGRLARDEDGRVEIDCNAGGVLFQEADAPDATIDYFGDFAPTMELKRLIPTVDFTDDISSFPLLVLQVTHFKCGGVAIGVGMQHHVADGFSGLHFINSWADLCRGVPIAVMPFIDRSLLRARDPPTPAYPHIEYQPAPAMLSSEPPQAALTSKPATPPTAVAIFKLSRAELVRLRSQVPAREGAPRFSTYAVLAAHVWRCASLARGLPADQPTKLYCATDGRQRLQPPLPEGYFGNVIFTATPLANAGTVTAGVAEGASVIQAALDRMDDGYCRSALDYLELQPDLSALVRGAHTFRCPNLGLTSWVRLPIHDADFGWGRPVFMGPGGIAYEGLAFVLPSANRDGSLSVAISLQAEHMEKFRKLIYDF

SEQ ID NO: 10145 - DNA, 1819 bp, Zea mays
  misc_feature: Ceres CLONE ID no. 1598987
  misc_feature: Ceres CDNA ID no. 29191605
  CDS (68)..(1480): REFERENCED BY SEQ ID NO: 10146
aacggcgctcaggccgtggcttactggcttccacccacagccttcgcacttccctccttcctcgcaaatggccgtcgccgtccccaacgctcccggccgcctcttccttctccaatccaccccgttcccgaaccctagcagctcggcatccgccgctcgagcccaatccttccgcgtaccacccctccgcctctcgctattccgacgcatggctgggcgctcgctgacggtgatcgcaggcgcctccggcggctccgaacgagatctcagcgcctccgcagtctccgtggaggccctggactccgtcgcctccgattctgacttagagacgaaggagcccagtgtgtcgacgatgctgacgagcttcgagaactcgttcgacaagtatggggctctgagcacaccgctgtaccagaccgccacctttaagcagccttcagctacagattatggaacttatgattacactagaagtggtaaccctactcgtgatgttctccagagcctcatggctaagcttgagaaagcagatcaagcattctgcttcaccagcgggatggcggcgttagctgcagtaacacacctccttcaggctggacaagaaatagttgctggtgaggacatatatggtggttctgatcgtctactctcgcaagttgtgccaagaaatggaatagttgtaaaacgagtagatacaacgaaaattagtgatgtggtgtctgcaattggaccctccactagactggtttggctcgaaagtcccacgaaccctcgtcagcaaattactgacattaagacaatctcagagatagcgcattctcatggtgctcttgttttggttgacaacagcatcatgtctccagtgctctcccgtcctatagaactgggagctgatatcgtgatgcactcggctaccaaatttatagcgggacatagtgatcttatggctggaattcttgcagtgaagggtgagagtttggctaaagaggtagggtttctgcaaaatgctgaagggtcgggtctggcaccttttgactgctggctttgcttgaggggaatcaaaaccatggctctgcgggtggagaaacaacaggctaatgcccagaagattgctgaattcctggcgtctcacccgagggtcaagcaagtaaactacgctgggcttcctgaccatcctgggcgagctttacactattcccaggcaaagggagcgggctctgttctcagttttctcaccggctcactggccctctcaaagcacgtcgtggagaccaccaagtacttcagcgtaacagtcagcttcgggagcgtgaagtccctcatcagcctgccgtgcttcatgtcccacgcatcaatccctgcctcggtccgcgaggagcgtggcctaaccgacgacctcgtccggatatcggtcggcatcgaggatgtcgaggacctcatcgccgatctggaccgcgcgctcagaactggcccggtgtagacatcgccgatccttaggtcatgtcaagctatcttttgatgattcattggttgactgcttgcgtgatgataataatgggaatgttgcttggatacgccgctgctacgccttctcgtactagtccgctaggatttgttcaccttgggtgaaaggctgcccgctgtcgagctgtcggcttgtgggatgtggccaccggcggcagcagtgccgcggtgagcaaacatgcctgtggtttcttccgtgcatgccctgaattctctgtcgttagcacttgtacatcccaatttgtgtgtaggaaaacgcgaacgccacgcattttagcaaaaaaaaaaaaaaaaa

SEQ ID NO: 10146 - protein, 470 aa, Zea mays
  misc_feature: Ceres CLONE ID no. 1598987
  misc_feature: Ceres CDNA ID no. 29191605
  misc_feature (135)..(382): Pfam Name: Beta_elim_lyase PFAM Desc: Beta
  misc_feature: Homolog of GI Number: 6911875 NR Desc: CYSTATHIONINE BETA
  misc_feature: Homolog of GI Number: 34898454 NR Desc: EST AU082557
  misc_feature: Homolog of GI Number: 34898474 NR Desc: EST AU082557
  misc_feature: Homolog of GI Number: 48093935 NR Desc: chloroplast cystathionine beta lyase
  misc_feature: Homolog of GI Number: 8439539 NR Desc: cystathionine beta
  misc_feature: Homolog of GI Number: 21281081 NR Desc: putative cystathionine beta
  misc_feature: Homolog of GI Number: 30694567 NR Desc: cystathionine beta
  misc_feature: Homolog of GI Number: 66844205 NR Desc: trans
  misc_feature: Homolog of GI Number: 57229931 NR Desc: cystathionine beta
  misc_feature: Homolog of GI Number: 57229932 NR Desc: cystathionine beta
MAVAVPNAPGRLFLLQSTPFPNPSSSASAARAQSFRVPPLRLSLFRRMAGRSLTVIAGASGGSERDLSASAVSVEALDSVASDSDLETKEPSVSTMLTSFENSFDKYGALSTPLYQTATFKQPSATDYGTYDYTRSGNPTRDVLQSLMAKLEKADQAFCFTSGMAALAAVTHLLQAGQEIVAGEDIYGGSDRLLSQVVPRNGIVVKRVDTTKISDVVSAIGPSTRLVWLESPTNPRQQITDIKTISEIAHSHGALVLVDNSIMSPVLSRPIELGADIVMHSATKFIAGHSDLMAGILAVKGESLAKEVGFLQNAEGSGLAPFDCWLCLRGIKTMALRVEKQQANAQKIAEFLASHPRVKQVNYAGLPDHPGRALHYSQAKGAGSVLSFLTGSLALSKHVVETTKYFSVTVSFGSVKSLISLPCFMSHASIPASVREERGLTDDLVRISVGIEDVEDLIADLDRALRTGPV

SEQ ID NO: 10147 - DNA, 2054 bp, Zea mays
  misc_feature: Ceres CLONE ID no. 1600886
  misc_feature: Ceres CDNA ID no. 35383471
  CDS (104)..(1699): REFERENCED BY SEQ ID NO: 10148
atcagctctactcaaagagcgctctaccagtacaaccacactaaaccccaaacccaaacacaaaaaaaaagggaagcaggtgctgccgatagatcgatcgatcatggcggccgtgggcaagatcggcatggagtggctccaagaccctctgagctgggtgttcctgggcacggtgtgcttggtggtcctgcagcagctgcaacgtcggcggggcaaagcgccgctgccgcccgggcctcaggcgctgccgatcgtgggcaacatggggatgatggaccagctgacgcaccgcgggctggcggcgctggcggagacgtacggcgggctgctgcacctgcggctggggcggctgcacgcgttcgcggtgtcgacgcccgagtacgcgcgcgaggtgctgcaggcgcaggacggcgcgttctcgaaccggccggcgaccgcggcgatcgcgtacctgacgtacgaccgcgcggacatggcgttcgcgcactacgggcccttctggcggcagatgcgcaagctgtgcgtgatgaagctgttcagccggcggcgcgccgagacgtgggcggccgtgcgcgacgagtgcgcggcgctggtccgggccgtagccgtgggcgggggcgggggcaggggcgaggccgtgaacctgggcgagctcatcttcagcctgacgaagaacgtgacgttccgcgcggcgttcggcacccgcgacggcgagggccaggaggagttcatcgccatcctgcaggagttctccaagctgttcggcgccttcaacgtgggcgactttctgccgtggctgggctggatggacctgcagggcatcaaccggcgcctgcgcgccgcccgctccgcgctggaccggttcatcgacaagatcatcgacgagcacgtgaggcgcgggaagagccccgacgacgccgacgccgacatggtcgacgacatgctcgccttcttcgtcgaggccacgccaggcaaggcgacgggcgccgccgccgctgacggcggcgacgacctgcacaacaccctccggctcacgcgcgacaacatcaaggccatcatcatggacgtgatgttcggcgggacggagacggtggcgtcggcgatcgagtgggccatggcggagatgatgcacagccccgacgacctgcgccgggtgcagcaggagctcgccgacgtcgtgggcctcgaccgcaacgtgagcgagtcggacctggacaggctccccttcctcaggtgcgtcatcaaggagacgctccggctgcacccgccgatcccgctgctcctccacgagaccgccgacgactgcgtcgtggccgggtactccgtgcccaggggctcccgcgtcatggtcaacgtctgggccatcggccgccaccgcgcctcgtggaaggacgccgacgcgttccgcccgtcgcggttcgcgccgcccgagggggaggccgcggggctcgacttcaagggcgggtgcttcgagttcctgccgttcgggtcgggccgccggtcctgccccgggatggcgctcggcctgtacgcgctggagctcgccgtcgcccagctcgcgcacgccttcaactggtcgctgcccgacggcatcaagccctcggagatggacatgagcgacatcttcggccttactgcgccgcgcgccacgcggctctacgccgtgcctacgccccggctcaactgccccttgtactgacgccgtgcacgtggcgcgcggggactgccactacgcatgcatgcgtttggactttggtgttcatccctggggtggggccgccgtgggggaagttaggagtttggtggctttctagctctgtcttcttgttttctgtttattataaattttctgaacccttccatgcctgatcgatacgcgctgtggggtaataattgttagaaaatgtgacattttgtacgtaatcaatccaaggggtgcggtagttatcgcgtcaagggacacactcctttacttgcaccccttcatgtatatacatgaacatccctgtaataaacaaatcgctgtcactttctatcaaaaaaaaaaaaaaaaa

SEQ ID NO: 10148 - protein, 531 aa, Zea mays
  misc_feature: Ceres CLONE ID no. 1600886
  misc_feature: Ceres CDNA ID no. 35383471
  misc_feature (42)..(521): Pfam Name: p450 PFAM Desc: Cytochrome P450
  misc_feature: Homolog of GI Number: 46403211 NR Desc: coniferylalcohol 5
  misc_feature: Homolog of GI Number: 10197650 NR Desc: cytochrome p450
  misc_feature: Homolog of GI Number: 10197652 NR Desc: cytochrome p450
  misc_feature: Homolog of GI Number: 47933890 NR Desc: ferulate 5
  misc_feature: Homolog of GI Number: 12578895 NR Desc: ferulate
  misc_feature: Homolog of GI Number: 12578899 NR Desc: ferulate
  misc_feature: Homolog of GI Number: 12578911 NR Desc: ferulate
  misc_feature: Homolog of GI Number: 57470997 NR Desc: ferulate
  misc_feature: Homolog of GI Number: 5002354 NR Desc: ferulate
  misc_feature: Homolog of GI Number: 6688937 NR Desc: ferulate
  misc_feature: Useful for making plants with altered leaf shape eg curled leaves
MAAVGKIGMEWLQDPLSWVFLGTVCLVVLQQLQRRRGKAPLPPGPQALPIVGNMGMMDQLTHRGLAALAETYGGLLHLRLGRLHAFAVSTPEYAREVLQAQDGAFSNRPATAAIAYLTYDRADMAFAHYGPFWRQMRKLCVMKLFSRRRAETWAAVRDECAALVRAVAVGGGGGRGEAVNLGELIFSLTKNVTFRAAFGTRDGEGQEEFIAILQEFSKLFGAFNVGDFLPWLGWMDLQGINRRLRAARSALDRFIDKIIDEHVRRGKSPDDADADMVDDMLAFFVEATPGKATGAAAADGGDDLHNTLRLTRDNIKAIIMDVMFGGTETVASAIEWAMAEMMHSPDDLRRVQQELADVVGLDRNVSESDLDRLPFLRCVIKETLRLHPPIPLLLHETADDCVVAGYSVPRGSRVMVNVWAIGRHRASWKDADAFRPSRFAPPEGEAAGLDFKGGCFEFLPFGSGRRSCPGMALGLYALELAVAQLAHAFNWSLPDGIKPSEMDMSDIFGLTAPRATRLYAVPTPRLNCPLY

SEQ ID NO: 10149 - DNA, 617 bp, Zea mays
  misc_feature: Ceres CLONE ID no. 1601659
  misc_feature: Ceres CDNA ID no. 25446577
  CDS (45)..(470): REFERENCED BY SEQ ID NO: 10150
atccagcttctctcgcctgtcggctgtcgcgtcgcatcgcatccatggcgggagcctccgcggtcgccgtgctgcccgtggccactccagccgcgccgcgccgaggaggcgccgggccgtgctcctgcttggcgcccggaggcagcagcttctaccgccgcatgaactgccggcgtgatagccccagcgcggtcgcgcctacgaggcgacgcgtcgtcgcccgtctctccgggcgcgaccccggcgaggccgggaccgacgcgggcgtggggcaaatcctcaagggtgatgactccggctatctgtggacattggtgcttgggtcccttggtggcgccgcggttatcaagtacggaagcatcctgctcccggacatcacgaggccaaacattgtggtagctctgctgatggtgtccctgccagtggtagccgcagtcttggctttgctcaaagcgagctcggcggactgatagtgacacgacgcgagaactccacgaaacctagaattcgagattactaaaacttgtttctaatgatagcttcatcgcatcttgtaagatggaaaagtttgaactctgctgaatgatttttttttggcaaaaaaaaaaaaaaaaaaa

SEQ ID NO: 10150 - protein, 141 aa, Zea mays
  misc_feature: Ceres CLONE ID no. 1601659
  misc_feature: Ceres CDNA ID no. 25446577
MAGASAVAVLPVATPAAPRRGGAGPCSCLAPGGSSFYRRMNCRRDSPSAVAPTRRRVVARLSGRDPGEAGTDAGVGQILKGDDSGYLWTLVLGSLGGAAVIKYGSILLPDITRPNIVVALLMVSLPVVAAVLALLKASSAD

SEQ ID NO: 10151 - DNA, 1187 bp, Zea mays
  misc_feature: Ceres CLONE ID no. 1601954
  misc_feature: Ceres CDNA ID no. 25446641
  CDS (251)..(787): REFERENCED BY SEQ ID NO: 10152
aacctctcgtccgggcccggccgtgttgacctgaccgaataaccacccgtctgccgctgtgccgcacggcccgcaccccgcacgagacccgtccttgaggggcacgtcctagatcggtggcgcctgcctctcgccgccgatacggtgcctctcgcggtctcgctccccctcgcaggtcttttggtttttttagttcctccctttgcttcttggaggtgtttgttgccgtctcacccgcagttcttgagacatgcagagccagatagtgtgccacgggtgcaggacccttctgttctacccaagaggtgctccgagcgtgtgttgtgcggtatgccatgtggtcaccaatgtgccgcctccagcaatggagatggctcgacttatatgtggtggctgccagacattattgatgtatgctcgcagtgcaacaactgtaagatgctcatgttgtgacacagtcaatcttgtcagaccagtgagtagcatagctcatgtgaactgtggccagtgccaaacagtgttgatgtatccatacggagcaccgtctgtcaaatgtgctgtttgcaacttcattacaaatgttggcggggtgactcccatgatacctttgccaccaccagcactacctgcatcaagtggaacttcatatatcatcccgtcaatttccgtgccgacgaatcaaccgcggaatgtaactgttgtcgttgaaaacccaatgacagtagatgacaagggaaaattggtgagcaatgttgtagtaggggttacgagcggcgggaaaaagtgacggcatatcacaaccgtgtgtagctttgtccaaactatctaaaaagggtttaagaatacataccttgtatcatactgctgtttggcgatcggctgctcgacggaggaatccccctccctggagagcgtagtggcaaagcagcgaggctttcgccactgcgaacgagccaaaaaaaaacgaagtgcgggtgtgcatactcagagtatatctgtagcttgttaccccttgattcttttgtatgtaatatgggctctgcctgactttcactgtgtgatcaaatttccaagcccgtgggcgctgttgctgcgtgccttgttattagtgaataacaaacattgcaaatggctcttgaaatacagtgtgtgtgtgttttaatctctcaaaaaaaaaaaaaaaaaaa

SEQ ID NO: 10152 - protein, 178 aa, Zea mays
  misc_feature: Ceres CLONE ID no. 1601954
  misc_feature: Ceres CDNA ID no. 25446641
  misc_feature (7)..(31): Pfam Name: zf PFAM Desc: LSD1 zinc finger
  misc_feature: Homolog of GI Number: 77556573 NR Desc: zinc finger protein LSD1
  misc_feature: Homolog of GI Number: 50881432 NR Desc: zinc finger protein
  misc_feature: Homolog of GI Number: 32400832 NR Desc: 18S subunit ribosomal protein
  misc_feature: Homolog of GI Number: 7268834 NR Desc: zinc
  misc_feature: Homolog of GI Number: 21436207 NR Desc: putative zinc
  misc_feature: Homolog of GI Number: 17981380 NR Desc: zinc finger protein LSD2
  misc_feature: Homolog of GI Number: 33867796 NR Desc: LSD1
  misc_feature: Homolog of GI Number: 42570227 NR Desc: zinc finger protein
  misc_feature: Homolog of GI Number: 62751057 NR Desc: LSD
  misc_feature: Homolog of GI Number: 42406064 NR Desc: zinc finger protein LSD1
MQSQIVCHGCRTLLFYPRGAPSVCCAVCHVVTNVPPPAMEMARLICGGCQTLLMYARSATTVRCSCCDTVNLVRPVSSIAHVNCGQCQTVLMYPYGAPSVKCAVCNFITNVGGVTPMIPLPPPALPASSGTSYIIPSISVPTNQPRNVTVVVENPMTVDDKGKLVSNVVVGVTSGGKK

SEQ ID NO: 10153 - DNA, 1078 bp, Zea mays
  misc_feature: Ceres CLONE ID no. 1602749
  misc_feature: Ceres CDNA ID no. 25446578
  CDS (98)..(451): REFERENCED BY SEQ ID NO: 10154
atgtggcacagtgcacacactcgtctcatcggagaaaagtagatccgggttagggttttagacggcgatcggtgcggcgggcgacgagaaggctgcgatggctgcgtccgctgcagccgcgggggccggtgccgccgagggcgagggcgcggtggactccaaggaccttcagcagcagagcaaggcgctcgacaagctcactgatcatgtcgaggaccggcagctcgattcatcccgtgtccaatccgccatggcggcacttgcttcatccaaggaggctgactggaacgcgatgaggctgagggagaaagaattggctgctgtcaagatcaaccctgccgatgtcgaaattatcgctagtgagcttgagctggacaagaagatcgcggagagaacgctccgtgagcacaagggtgatgccgtggctgcggttcgattcctgctgcgctagttccgagatttcgtcgccagcatcacatgttccccttcagttccacacaagaggtgatgatgtgaagcactagtacttttatctgtgtgcctgttttggaagtttgctattagaactatgttgcagaaaattaagaatgagaataccatgcaaaaggtgtaatatgatttgtattaattatttgctattagaactaattaatcattaatagaaaaacgcaccagagagtaaccaagcccggaacaaacatcagctatgctatcctccagactgtcaggattcatatggaggttgttgaacctcagcctcatcgcccaaagctgcaactcaccctgatatgaaaaatgtacagctgaattgtagcaacattgtagtgttttcccgggcctctcacacctccagctcactctttagttcaacattggtgtgattttcgatttgtaaaactaatcagtaatcaccacatggtcaagattttgtagtatcagatagttttttctcaatacatggggctctatgcatggaagcttagtttctgaatggtactcacaatagagaaaatatacgacattgtattctgtttatgtgaaagagatgtatgttaatgtgacaaaaaaaaaaaaaaaa

SEQ ID NO: 10154 - protein, 117 aa, Zea mays
  misc_feature: Ceres CLONE ID no. 1602749
  misc_feature: Ceres CDNA ID no. 25446578
  misc_feature: Homolog of GI Number: 68439841 NR Desc:  similar to Huntingtin interacting protein K
  misc_feature: Homolog of GI Number: 51593146 NR Desc: MGC85228 protein
  misc_feature: Homolog of GI Number: 27734984 NR Desc: Huntingtin interacting protein K
  misc_feature: Homolog of GI Number: 61862440 NR Desc:  similar to Huntingtin interacting protein K
  misc_feature: Homolog of GI Number: 57108467 NR Desc:  similar to Huntingtin interacting protein K
  misc_feature: Homolog of GI Number: 62645673 NR Desc:  similar to Huntingtin interacting protein K
  misc_feature: Homolog of GI Number: 23306125 NR Desc: Putative mitotic control protein dis3
  misc_feature: Homolog of GI Number: 3329429 NR Desc: huntingtin interacting protein HYPK
  misc_feature: Homolog of GI Number: 34861312 NR Desc: similar to RIKEN cDNA 2310003F16
MAASAAAAGAGAAEGEGAVDSKDLQQQSKALDKLTDHVEDRQLDSSRVQSAMAALASSKEADWNAMRLREKELAAVKINPADVEIIASELELDKKIAERTLREHKGDAVAAVRFLLR

SEQ ID NO: 10155 - DNA, 601 bp, Glycine max
  misc_feature: Ceres CLONE ID no. 1606237
  misc_feature: Ceres CDNA ID no. 35383473
  CDS (17)..(436): REFERENCED BY SEQ ID NO: 10156
acagaaagagaaagcaatggcttctctggcaagcttagctgttgttcaaccatctactgtcaagggccttgctggaactaagctctctttcaagccctctcgccagagcttcagacccaagaatttcaggagtggtgccgttgtagcaaagtacggtgacaagagtgtgtactttgatttggaggatctaggcaacactactggtcagtgggacttgtacggctccgatgcaccttcaccctacaaccctcttcagagcaagttcttcgagacattcgccgctccattcacaaagaggggattgttactaaagtttttgatcctgggaggtggttccaccctggcatacttgagtgccacagcgtcaggtgacattctaccaatcaagaagggcccacaacttccaccaaagccaggtccccgtggcaagatctaattttgtttcccaattccatctgtttagctccttcccctcccccttcttcttcttctcttgaattgaacatgtatatctctatttgcatacaatgtgtaagtacgcctaaagcctacttctattaaattatgttcatttctggtccaaaaaaaaaaaaaaaaaaaa

SEQ ID NO: 10156 - protein, 139 aa, Glycine max
  misc_feature: Ceres CLONE ID no. 1606237
  misc_feature: Ceres CDNA ID no. 35383473
  misc_feature (6)..(139): Pfam Name: PSI_PsaH PFAM Desc: Photosystem I reaction centre subunit VI
  misc_feature: Homolog of GI Number: 33520419 NR Desc: photosystem I psaH protein
  misc_feature: Homolog of GI Number: 407353 NR Desc: PSI
  misc_feature: Homolog of GI Number: 397555 NR Desc: photosystem I psaH protein
  misc_feature: Homolog of GI Number: 1916350 NR Desc: PSI
  misc_feature: Homolog of GI Number: 21553440 NR Desc: Photosystem I reaction center subunit VI
  misc_feature: Homolog of GI Number: 407355 NR Desc: PSI
  misc_feature: Homolog of GI Number: 21618081 NR Desc: photosystem I subunit VI precursor
  misc_feature: Homolog of GI Number: 21287 NR Desc: psaH
  misc_feature: Homolog of GI Number: 445929 NR Desc: photosystem I:SUBUNIT=PS I
  misc_feature: Homolog of GI Number: 445928 NR Desc: photosystem I:SUBUNIT=PS I
  misc_feature: Useful for making plants with increased biomass and foliage
MASLASLAVVQPSTVKGLAGTKLSFKPSRQSFRPKNFRSGAVVAKYGDKSVYFDLEDLGNTTGQWDLYGSDAPSPYNPLQSKFFETFAAPFTKRGLLLKFLILGGGSTLAYLSATASGDILPIKKGPQLPPKPGPRGKI

SEQ ID NO: 10157 - DNA, 428 bp, Glycine max
  misc_feature: Ceres CLONE ID no. 1606651
  misc_feature: Ceres CDNA ID no. 29191606
  CDS (72)..(227): REFERENCED BY SEQ ID NO: 10158
ctccgtagggtttggttattagggttttcgctcacccgtgtgcagtcgagcctcccgaagaaaaagcgaaaatgccgtcgcacaagacattcagaatcaagaagaagttggcgaagaagatgaggcagaacaggcccatcccctactggatccgcatgaggaccgacaacaccatcaggtacaacgcgaagcgccgtcactggcgtcgcaccaagcttggattctgaggtgcttgctttgcctcgattcagtttatccaattaattagtgttttattttcttgagccaaaaacaatgctttggagtttttaatattttgcattttattccaagactatattgtgtaaggaatttattgtagtacgtttgacgtgggtctatttgcaatttcgagtatttggcaaaaccaaaaaaaaaaaaaaaaaaaa

SEQ ID NO: 10158 - protein, 51 aa, Glycine max; identical to SEQ ID NO: 2406
  misc_feature: Ceres CLONE ID no. 1606651
  misc_feature: Ceres CDNA ID no. 29191606
  misc_feature (9)..(51): Pfam Name: Ribosomal_L39 PFAM Desc: Ribosomal L39 protein
  misc_feature: Homolog of GI Number: 50915614 NR Desc: putative 60S ribosomal protein L39
  misc_feature: Homolog of GI Number: 50915618 NR Desc: 60S RIBOSOMAL PROTEIN L39
  misc_feature: Homolog of GI Number: 55773789 NR Desc: 60S ribosomal protein L39
  misc_feature: Homolog of GI Number: 57471714 NR Desc: ribosomal protein L39
  misc_feature: Homolog of GI Number: 21618028 NR Desc: putative ribosomal protein L39
  misc_feature: Homolog of GI Number: 24266968 NR Desc: ribosomal protein L39
  misc_feature: Homolog of GI Number: 66934980 NR Desc: ribosomal protein L39
  misc_feature: Homolog of GI Number: 67084113 NR Desc: ribosomal protein L39
  misc_feature: Homolog of GI Number: 58394407 NR Desc: ENSANGP00000020220
  misc_feature: Homolog of GI Number: 62655648 NR Desc:  similar to RIKEN cDNA 4930517K11

SEQ ID NO: 10159 - DNA, 597 bp, Glycine max
  misc_feature: Ceres CLONE ID no. 1606903
  misc_feature: Ceres CDNA ID no. 25402482
  CDS (82)..(468): REFERENCED BY SEQ ID NO: 10160
aaaaagtctctctctctctctctctctctctctcggtgtgtctctatctcattcccgttgtagcaacggcttggcgacacgatgcatagacaatccttgggttctccttctcccaaagtccccaagctcatcaccgacgaagacgacgatgctcccaaacctcaccgtctcagtctcagcctctcctcgccgccgcctacgccgccgcacaagttcgtccacctcattcctctcctcactctcctctgcttcttcgtcctctacctcttctcccactctccctctccatcagacttgaatcatttcaccggattcaaccgctcgccctcgcaccgtctagatttggcggagaagatcggcggcgacattggacaatacatggatgtaaaaagaagcgatgttttggcgatccgaagtttgcaacagcttccgaaacctcgccctcaccggaaactcgccgatttttaagctcgcacgtgctcttcgcttattttccttaatattcttgttcctgttgtacatcatatttgcttttatttatcgctcgagaaaaaaataaaatcattttcaccttcttacaaaaaaaaaaaaaaaaaa

SEQ ID NO: 10160 - protein, 128 aa, Glycine max
  misc_feature: Ceres CLONE ID no. 1606903
  misc_feature: Ceres CDNA ID no. 25402482
  misc_feature: Homolog of GI Number: 32489376 NR Desc: OSJNBa0009P12.33
MHRQSLGSPSPKVPKLITDEDDDAPKPHRLSLSLSSPPPTPPHKFVHLIPLLTLLCFFVLYLFSHSPSPSDLNHFTGFNRSPSHRLDLAEKIGGDIGQYMDVKRSDVLAIRSLQQLPKPRPHRKLADF

SEQ ID NO: 10161 - DNA, 642 bp, Glycine max
  misc_feature: Ceres CLONE ID no. 1606942
  misc_feature: Ceres CDNA ID no. 25402483
  CDS (2)..(334): REFERENCED BY SEQ ID NO: 10162
ggtacttctgaaaagcccaccccaaagtcgaaacgaaagcgcagagagagcgaaacgatgtcgtacgacgatgtggagatcgaggacatggagtggaacgaggagttgcaggcgtacacgtacccgtgcccgtgcggggacctgttccagatcacgaaggaagaccttaagctcggcgaagagattgctcgatgccctagttgctctctctacatcaccgtcatctacaacctcgaagatttcctctccgattccgatcaaaatcgaccaaacaagggcctccaaccttccaagcagcaacccctcaccgttgcttgaatttcagatgtcctgacatgaagagcggagtaggttttgtcatggctttgatttatcataccatcacatatattgttttgcagataggaattcttggtatttttgatggagaaatggagaaatgaataatatgatagatttatattaccgcaagaatactattgttatttgctcttctgaagggaagagggagccaagattcttgccattgaactttgatacgatatcatgtcaattatctggtgtgaaacatatcgttgtaatagacttcttaataccacccgtttacagaattatatcagctaaaaaaaaaaaaaaaaaaaa

SEQ ID NO: 10162 - protein, 86 aa, Glycine max
  misc_feature: Ceres CLONE ID no. 1606942
  misc_feature: Ceres CDNA ID no. 25402483
  misc_feature (4)..(58): Pfam Name: zf PFAM Desc: CSL zinc finger
  misc_feature: Homolog of GI Number: 50732744 NR Desc:  similar to RIKEN cDNA 2610018L09
  misc_feature: Homolog of GI Number: 31200821 NR Desc: ENSANGP00000015671
  misc_feature: Homolog of GI Number: 75765322 NR Desc: Chain A
  misc_feature: Homolog of GI Number: 54639692 NR Desc: GA13188
  misc_feature: Homolog of GI Number: 57103884 NR Desc:  similar to Zinc finger
  misc_feature: Homolog of GI Number: 61822745 NR Desc:  similar to Zinc finger
  misc_feature: Homolog of GI Number: 66849408 NR Desc: CSL family zinc fnger
MSYDDVEIEDMEWNEELQAYTYPCPCGDLFQITKEDLKLGEEIARCPSCSLYITVIYNLEDFLSDSDQNRPNKGLQPSKQQPLTVA

SEQ ID NO: 10163 - DNA, 480 bp, Glycine max
  misc_feature: Ceres CLONE ID no. 1607106
  misc_feature: Ceres CDNA ID no. 25447085
  CDS (43)..(261): REFERENCED BY SEQ ID NO: 10164
accattttggagggagagaaaaaaaaagggggggaaatttcaatggcgtcaagggtttctctgaaggcgaagggtaagagttcaaagggatcgaaggccgcggaagatcgatctgcgagcgagtgcctgaaggagtggacgacatgggcaatgcgaaaagcgaaggtcatcactcactatggtttcatccctttggtcatcatcatcggtatgaactctgaccccaagcccccactttcccagcttctcagccccgtctgatctacctcttcatttcttccaccatcaacgcgacctcgtttttttcttttcttttgccccctttctacatttgtaagtttctttatggatcaattttcacttgcacatctcatgtggcatggtgtgttcaaagtcgattagcttgtctgtgtgtttggatagttttgaaagacgcggtagtaaataatccgttttttttataaaaaaaaaaaaaaaaaa

SEQ ID NO: 10164 - protein, 72 aa, Glycine max
  misc_feature: Ceres CLONE ID no. 1607106
  misc_feature: Ceres CDNA ID no. 25447085
  misc_feature (30)..(69): Pfam Name: Tom7 PFAM Desc: TOM7 family
  misc_feature: Homolog of GI Number: 13605535 NR Desc: AT5g41690/MBK23_23
  misc_feature: Homolog of GI Number: 15222645 NR Desc: preprotein translocase
  misc_feature: Homolog of GI Number: 3319774 NR Desc: TOM7 protein
  misc_feature: Homolog of GI Number: 34912862 NR Desc: P0006C01.15
  misc_feature: Homolog of GI Number: 50313239 NR Desc: TOM7
MASRVSLKAKGKSSKGSKAAEDRSASECLKEWTTWAMRKAKVITHYGFIPLVIIIGMNSDPKPPLSQLLSPV

SEQ ID NO: 10165 - DNA, 546 bp, Glycine max
  misc_feature: Ceres CLONE ID no. 1607161
  misc_feature: Ceres CDNA ID no. 40352060
  CDS (130)..(315): REFERENCED BY SEQ ID NO: 10166
gttccgcagaaaaccctagcccaaccggatcttcacgactagggttcgctctgtgcaaattctctaacttgttctcactttgttgatttcctcttcatttcgtaacattttgtgcattgaattgcagagatggcaaagtcgaagaaccacaccgctcacaaccagtcctacaaggcccataagaatggcatcaaaaagccaaagaggcatcgccacacttccaccaaagggatggatccaaagtttctgaggaaccagaggtacgcgaggaagcataacaagaagagcggtgaaacagccaccgaagaagagtaaagtgccactctcaaatgggcctattaggatttgatttgttatttaagccccatatgttttgtgtcgaatctatctttagtagtatagtcatttttatgagttaacttaatccagagagaatgcagtacttactcttatagcatcgttgttggtttttgttaaggacccttgaaattttatcaatggattattattcagttgtttatgcttttcaaaaaaaaaaaaaaaaaa

SEQ ID NO: 10166 - protein, 61 aa, Glycine max
  misc_feature: Ceres CLONE ID no. 1607161
  misc_feature: Ceres CDNA ID no. 40352060
  misc_feature (4)..(42): Pfam Name: Ribosomal_L29e PFAM Desc: Ribosomal L29e protein family
MAKSKNHTAHNQSYKAHKNGIKKPKRHRHTSTKGMDPKFLRNQRYARKHNKKSGETATEEE

SEQ ID NO: 10167 - DNA, 433 bp, Glycine max
  misc_feature: Ceres CLONE ID no. 1607283
  misc_feature: Ceres CDNA ID no. 25891625
  CDS (77)..(232): REFERENCED BY SEQ ID NO: 10168
attttttcttcgttgagcagaaagctaaaggctaaagcctagaaccttcttcctttacacctcgctggaaccagcgatggatcctcagcctgagccagtcagctacatatgcggagattgtggaatggagaatacgctgaagcccggtgacgttatacagtgccgtgagtgcggttaccgtattctttacaagaagcgcactcgtcgcattgtccagtacgaggcacgctgaagaaaactgctataacgtttgcaagtaatttccatgaagaaattgttactacatctgtgttgtgtgatattgaagaactacttttaattctacagtagattgctttttgggtgatgtttagcaaaagataaaaactttgaatgtgaatatattacaaacatccgtgtttcattagtttgcgaaaaaaaaaaaaaaaaaaaa

SEQ ID NO: 10168 - protein, 51 aa, Glycine max; identical to SEQ ID NO: 2520
  misc_feature: Ceres CLONE ID no. 1607283
  misc_feature: Ceres CDNA ID no. 25891625
  misc_feature (10)..(41): Pfam Name: DNA_RNApol_7kD PFAM Desc: DNA directed RNA polymerase
  misc_feature: Homolog of GI Number: 62858105 NR Desc: LOC549263
  misc_feature: Homolog of GI Number: 4826924 NR Desc: DNA directed RNA polymerase II polypeptide K
  misc_feature: Homolog of GI Number: 20306771 NR Desc: Polymerase
  misc_feature: Homolog of GI Number: 8248885 NR Desc: metallothionein
  misc_feature: Homolog of GI Number: 2529427 NR Desc: Rpc10
  misc_feature: Homolog of GI Number: 62641997 NR Desc:  similar to DNA
  misc_feature: Homolog of GI Number: 76673725 NR Desc:  similar to sperm associated antigen 1
  misc_feature: Homolog of GI Number: 82942443 NR Desc:  similar to DNA
  misc_feature: Homolog of GI Number: 25396103 NR Desc: protein F23B2.4

SEQ ID NO: 10169 - DNA, 438 bp, Glycine max
  misc_feature: Ceres CLONE ID no. 1607366
  misc_feature: Ceres CDNA ID no. 36707132
  CDS (83)..(208): REFERENCED BY SEQ ID NO: 10170
acacagctattcctcttaagcttgctactgagtttccacactgcataccttaggtcttccgaattcgaagttaatttgcaagatggctaaggaaaaggctcagatcaacattgtggtggttggtcatgtggaccctgaggaggcaaccaccattaacgagctgaagaagcctgttgtggagaaagaagctccagggcatgccatatgagggcatgcacgtacggcctcggaggggaaccagaaaattatgttaacaaaataatctggaaccctaatgtatcagtgtcatcatcagtgtgtagtttaagctagctttgctatggttacgttctttgagatgagagtcttgatgaacagtaccattctgatgtattgctttccttgaaagttaatgcatgcttcttatcttctgtctagctaaaaaaaaaaaaaaaaaaa

SEQ ID NO: 10170 - protein, 41 aa, Glycine max; identical to SEQ ID NO: 1944
  misc_feature: Ceres CLONE ID no. 1607366
  misc_feature: Ceres CDNA ID no. 36707132
  misc_feature: Homolog of GI Number: 83286887 NR Desc: auxin down
  misc_feature: Homolog of GI Number: 485513 NR Desc: ADR12

SEQ ID NO: 10171 - DNA, 503 bp, Glycine max
  misc_feature: Ceres CLONE ID no. 1607692
  misc_feature: Ceres CDNA ID no. 29191607
  CDS (44)..(322): REFERENCED BY SEQ ID NO: 10172
gtattcggcagccgcgatatcatcttcttatagccactcgaaaatgaccaagagaaccaagaaggccggtattgttggaaaatacggcacccgatatggtgctagtttaaggaaacaaatcaagaagatggaagttagtcagcacagtaaattcttctgcgagttctgtggaaagtatgctgttaagaggaaggctgtgggtatttggggctgcaaagattgtggaaaagtgaaggctggaggtgcttacacattgaacactgccagtgctgtcactgtccggagcaccattcggaggctgagagagcagactgagagttgaaagcagtttacacttttcatttgttttcaaatcataaattttgctgctgtttattttgaaattagcatacttgctttggatagttgatggaattttggcaggtctttgttaagaatattagtaatgtaactttgaatgatatttagttttgtattcttgagtcaaaaaaaaaaaaaaaaaa

SEQ ID NO: 10172 - protein, 92 aa, Glycine max; identical to SEQ ID NO: 3392
  misc_feature: Ceres CLONE ID no. 1607692
  misc_feature: Ceres CDNA ID no. 29191607
  misc_feature: null
  misc_feature: Useful for making plants with modulated cold sensitivity
  misc_feature (2)..(91): Pfam Name: Ribosomal_L37ae PFAM Desc: Ribosomal L37ae protein family
  misc_feature: Homolog of GI Number: 58578274 NR Desc: 60S ribosomal protein L37a
  misc_feature: Homolog of GI Number: 4741896 NR Desc: 60S ribosomal protein L37a
  misc_feature: Homolog of GI Number: 56202147 NR Desc: putative ribosomal protein L37a
  misc_feature: Homolog of GI Number: 4090257 NR Desc: ribosomal protein L37A
  misc_feature: Homolog of GI Number: 34911166 NR Desc: putative 60S ribosomal protein L37a
  misc_feature: Homolog of GI Number: 50932741 NR Desc: putative 60S ribosomal protein L37a
  misc_feature: Homolog of GI Number: 6016699 NR Desc: putative 60S ribosomal protein L37a
  misc_feature: Homolog of GI Number: 395077 NR Desc: ribosomal protein L37a
  misc_feature: Homolog of GI Number: 71042079 NR Desc: Chain D
  misc_feature: Homolog of GI Number: 7576200 NR Desc: protein synthesis initiation factor
  misc_feature: Useful for making plants with altered leaf shape eg curled leaves
  misc_feature: Utility: Cold Germination Useful for making plants with increased tolerance to cold stress

SEQ ID NO: 10173 - DNA, 676 bp, Glycine max
  misc_feature: Ceres CLONE ID no. 1607732
  misc_feature: Ceres CDNA ID no. 25402329
  CDS (150)..(443): REFERENCED BY SEQ ID NO: 10174
aactcttgttatctatctctgacttttctactcttccaacctcaactcaagctccgagtccaactactaggctattagcaatagcgcatagagagagaatcaaaattcaaaacccgaaattgatataatttatcaacttcaattgagacatgcatctatggccgacaaagaatctccgagattccttcaaggattcatacctcaaaaggctcgaatggaactaccagagaatgaaagcggaaaagaaccaacaacaatcctcgacggaacagaaacttctggaaaacgaaaaccaggatcatggcaacaataacaacggtgacgcacccaacctcctcaattgcgaagctggctcggtctcttccctgttccaggaattgttgttggttctctcctgctgctactgctgcttttgctgtggtgcttgtgttgatgagaaataacgagctacatgattgatggcagtgcttctattctgtcctcgatgctcttggtgacaatttgtgcatagtacagtgattaagttttgtacatttggttattgattttcttataattatttagattttaacattattatacaattattctgttatgtgattcgtaaagggtactaatagactgattgataggatttgtttcccctttatattttctacaaaaaaaaaaaaaaaaa

SEQ ID NO: 10174 - protein, 97 aa, Glycine max
  misc_feature: Ceres CLONE ID no. 1607732
  misc_feature: Ceres CDNA ID no. 25402329
MHLWPTKNLRDSFKDSYLKRLEWNYQRMKAEKNQQQSSTEQKLLENENQDHGNNNNGDAPNLLNCEAGSVSSLFQELLLVLSCCYCCFCCGACVDEK

SEQ ID NO: 10175 - DNA, 531 bp, Glycine max
  misc_feature: Ceres CLONE ID no. 1607819
  misc_feature: Ceres CDNA ID no. 25402484
  CDS (87)..(335): REFERENCED BY SEQ ID NO: 10176
gttctccgttcagcgccaaaacgaacaccacctaaccagctcgtgattcttcccgccgtagatctgttccttttcgccgttcctccatggccgacgacttcgaattctccgacaaagtccctccttccttcgatcgcgtgggttcaaaagggttcaacccagcattaattgttctccttcttgttggtgggttgctgttgatattcctcgttggaaattatgtactatacacatatgcacagaagaccctccctcctagaaaaaaaaagccaatctcaaagaagaagatgaaaaaggagagactgaagcagggcgtctctgcacctggagagtagaactttttcctcactctatattctgtgatgttaaattgtactcttttagaaaaaatttctcgttctgtggtctctggagtttgttaatctttatcttagtcatgtgttttactgactgaaatctcgaccacataaattaagtactttgttaaaatatttggaacaaattatttcgtgcaaaaaaaaaaaaaaaaaa

SEQ ID NO: 10176 - protein, 82 aa, Glycine max; identical to SEQ ID NO: 4592
  misc_feature: Ceres CLONE ID no. 1607819
  misc_feature: Ceres CDNA ID no. 25402484
  misc_feature: The plant is abnormally small.
  misc_feature: Useful for making plants with modulated growth and phenotype characteristics
  misc_feature: The sequence is a functional homolog of  SEQ ID NO 1761 in the  11/479,226 US patent application
  misc_feature: The sequence is a functional homolog of  SEQ ID NO 1765 in the  11/479,226 US patent application
  misc_feature: The sequence is a functional homolog of  SEQ ID NO 1769 in the  11/479,226 US patent application
  misc_feature: The sequence is a functional homolog of  SEQ ID NO 2604 in the  10/374,780 US patent application
  misc_feature: The sequence is a functional homolog of  SEQ ID NO 874 in the  10/412,699 US patent application
  misc_feature: The sequence is a functional homolog of  SEQ ID NO 960 in the  10/225,066 US patent application
  misc_feature: Useful for making plants with modulated biomass
  misc_feature (13)..(82): Pfam Name: S1FA PFAM Desc: DNA binding protein S1FA
  misc_feature (14)..(82): Pfam Name: S1FA PFAM Desc: DNA binding protein S1FA
  misc_feature: Homolog of GI Number: 498705 NR Desc: s1Fa
  misc_feature: Homolog of GI Number: 38347601 NR Desc: OSJNBa0042I15.14
  misc_feature: Homolog of GI Number: 1173349 NR Desc: DNA
  misc_feature: Homolog of GI Number: 38347600 NR Desc: OSJNBa0042I15.13

SEQ ID NO: 10177 - DNA, 571 bp, Glycine max
  misc_feature: Ceres CLONE ID no. 1607846
  misc_feature: Ceres CDNA ID no. 36707256
  CDS (101)..(295): REFERENCED BY SEQ ID NO: 10178
gagacgagggtaaggtcgcgttgtgttgcgtcgtgtcgtgcgctgttcctctgtctgtcgtttttgttttcagaccaaaccctagctccgcatcgcaaccatgtcgaccaagcaaggtggaaaagctaagcctttgaagaaacccaagtctgataagaaggattacgacgaggttgacatggctaacattcagaagaaaaaggaagaggagaaggcgctaaaggagttgaaagccaaggcgcaacagaagggaagctttggaggttctgggctcaagaaaagtggaaagaaataagggctctttatcatgattgtatacatccaatattgagccctgtagtttattaccatgataacttctgtcttattgtggccttctttattgctctaatgttagtactgaactgaggtatttcgtgatgtaagctgcaacaagttacttgtttgtagctttattgtgtggcccttcatggggttctgataattacatcctattagtagtgctgtggatttggcatagacttgttcaagtaataatgacttggcttgcgaaaaaaaaaaaaaaaaaaaa

SEQ ID NO: 10178 - protein, 64 aa, Glycine max
  misc_feature: Ceres CLONE ID no. 1607846
  misc_feature: Ceres CDNA ID no. 36707256
  misc_feature: Homolog of GI Number: 62858517 NR Desc: LOC549128
  misc_feature: Homolog of GI Number: 55622606 NR Desc:  similar to Keratin
  misc_feature: Homolog of GI Number: 55661245 NR Desc:  similar to GRB2
MSTKQGGKAKPLKKPKSDKKDYDEVDMANIQKKKEEEKALKELKAKAQQKGSFGGSGLKKSGKK

SEQ ID NO: 10179 - DNA, 499 bp, Glycine max
  misc_feature: Ceres CLONE ID no. 1607874
  misc_feature: Ceres CDNA ID no. 36707133
  CDS (64)..(273): REFERENCED BY SEQ ID NO: 10180
aaacatctattacattagaattcagatccaaacgaaacgcaggagagacagacagagaagagaatggacgctattgattctgtgttcgatccgctcagggaattcgccaaggacagcgtcaggctcgtcaagcgatgccacaagcccgatcgcaaagaattctccaaggttgctgtgcgtaccgcgatcggtttcgttgtgatgggattcgtgggttttttcgttaagctcatcttcattccaattaacaacatcatcgtcggatctggttaggatgaggggaatcgcaatcgcctcaggaattcaagttatcaaacaaaatgagaggcagaaagagttccaacttcaaatagatagctcaatgaaattaattgtagttctgctgtatttcatttttggtttacctttgtatcttcggaagcattacaattttatttgaaatgtaaaattttgtttttccatgtgctggacctttagacaaaaaaaaaaaaaaaaaaaa

SEQ ID NO: 10180 - protein, 69 aa, Glycine max
  misc_feature: Ceres CLONE ID no. 1607874
  misc_feature: Ceres CDNA ID no. 36707133
  misc_feature (10)..(66): Pfam Name: SecE PFAM Desc: SecE/Sec61
  misc_feature: Homolog of GI Number: 51535598 NR Desc: putative transport protein SEC61
  misc_feature: Homolog of GI Number: 50252067 NR Desc: transport protein SEC61
  misc_feature: Homolog of GI Number: 72076451 NR Desc:  similar to Protein transport protein SEC61 gamma subunit
  misc_feature: Homolog of GI Number: 38605207 NR Desc: Protein transport protein SEC61 gamma subunit
  misc_feature: Homolog of GI Number: 31201847 NR Desc: ENSANGP00000019007
  misc_feature: Homolog of GI Number: 74096057 NR Desc: sec61 protein
  misc_feature: Homolog of GI Number: 14701917 NR Desc: SEC61
  misc_feature: Homolog of GI Number: 83001969 NR Desc:  similar to Protein transport protein SEC61 gamma subunit
  misc_feature: Homolog of GI Number: 37654254 NR Desc: LRRGT00019
MDAIDSVFDPLREFAKDSVRLVKRCHKPDRKEFSKVAVRTAIGFVVMGFVGFFVKLIFIPINNIIVGSG

SEQ ID NO: 10181 - DNA, 1078 bp, Glycine max
  misc_feature: Ceres CLONE ID no. 1608679
  misc_feature: Ceres CDNA ID no. 35383474
  CDS (1)..(642): REFERENCED BY SEQ ID NO: 10182
aaaagcgccgaaagaaagaaacctaacagcgccatagcgttctctaagctatcgtgcgaggtccctcgacctccgcacaaccccagcaccaaggggctgtgcctgtcgtcgtcttccacgcccatgtcggaacccgacacccaggcgccgccgccgcctccgttcctgctccagcgcccgccgcttctgcagtcggcgtcgccgctcttcaagcagcggtcgtggtcgccggacgccttccgcgacgaggcgtggctccgccgcaaggggaactggaagaaccgccgcagtaagagcgtcaccgatgaggacgtggacgagctcaaggcctgcatcgagttaggctttggattcgattcctcccccgaggtcgagctcgatcaacgcctctccgatactctacccgctctcggcctctactacgccgtcaacaaacgctacaacgactcccttgtcaccaaaaccacgccgtcctcctcctcctcctccgccgcctccgattgcgacagcactccttgcccccacggcagtccccactccgccatcttcaccaccggtgataaccctcagacggtgaagacgaggctgaggcagtgggctcaggtagttgcttgtgcggtgcgacaaagttcagatgtgtgatgataataattaccgaatggagaagcagggttgtaaaacctaaaccatacagtagaagcaatgtgtgatgattgatattataaatgacaacgatttcccaccgaaccagaccaaaccaaaccgagagtgaaccctagttaaccacccaatcgtggcggaaccaaagtagttagttagctatattacattacaattacatgtggggctgtcggcagcgccttgttttgtactgtacttgtccaatatgtgatgactaagccaaggtagatctattatagtattatctatgtcatatgatatatgctagacgtacgtacaaattagttttgtttttgtttttgtgctgagtgtgtgacaggaagaaaaaaaaagtcaaaaggtgttctactgcatttgaatccagtgctggttgtgctgctaaaaaaaaaaaaaaaaa

SEQ ID NO: 10182 - protein, 172 aa, Glycine max
  misc_feature: Ceres CLONE ID no. 1608679
  misc_feature: Ceres CDNA ID no. 35383474
  misc_feature: Homolog of GI Number: 27808522 NR Desc: At4g33985
  misc_feature: Homolog of GI Number: 50922341 NR Desc: OSJNBa0071G03.3
  misc_feature: Homolog of GI Number: 67987177 NR Desc: 4Fe
  misc_feature: Homolog of GI Number: 535586 NR Desc: proline rich protein
  misc_feature: Useful for making bigger plants
  misc_feature: Useful for making lethal plants for genetic confinement systems
  misc_feature: Useful for making ornamental plants with modified flowers
  misc_feature: Useful for sterility
  misc_feature: Useful for sterility
MSEPDTQAPPPPPFLLQRPPLLQSASPLFKQRSWSPDAFRDEAWLRRKGNWKNRRSKSVTDEDVDELKACIELGFGFDSSPEVELDQRLSDTLPALGLYYAVNKRYNDSLVTKTTPSSSSSSAASDCDSTPCPHGSPHSAIFTTGDNPQTVKTRLRQWAQVVACAVRQSSDV

SEQ ID NO: 10183 - DNA, 806 bp, Glycine max
  misc_feature: Ceres CLONE ID no. 1608682
  misc_feature: Ceres CDNA ID no. 29191223
  CDS (85)..(495): REFERENCED BY SEQ ID NO: 10184
aattttgcttcgaatttcttgtcacagtctctgcttcgctgcaaacagtgattcactgatcattgagtagtagtgattggaaagatgaaccagaacccgcaatcaagtgatggaaggaacgatgacgattctgctctctctgatttcctcgcttccttaatggattatactcccactatacccgatgaattggtggagcattacttggccaagagcggttttcaatgtcccgatgttcgattgactaggttggtagctgttgccactcagaagtttgtagctgaagttgcaggagatgcacttcagcactgcaaagcaagacaagcaacaattccaaaagacaaaagagacaagcagcagaaggataagcgccttgttttgacaatggaagacctttcaaaggcattgcgtgagtatggcgtgaatttaaggcatcaagaatattttgctgatagtccttctaccggaatggatcctgctactcgtgaagaatgagtccttgtttgtgtgttcaggcttctaaaatgtcgtgtttagagcatagttaatggaacaattttcaggatatgatgctcaaactataacaacctcttcctcgaatctgccaaagcaatgcaattgttcaccactaacattaatggtgcttgtagaaattcgtgaatctgattatcagcaatgaactcatcttatgtttctctgtttttttttttttttaaatgccccccgtttgtatcagcaatgaattttcacttagtatgggatttgacataatgcattgtagaagtcgtaaaaaaaaaaaaaaaaaa

SEQ ID NO: 10184 - protein, 136 aa, Glycine max
  misc_feature: Ceres CLONE ID no. 1608682
  misc_feature: Ceres CDNA ID no. 29191223
  misc_feature: null
  misc_feature: Useful for making plants with altered Lignin content
  misc_feature: Useful for making plants with altered terpenoid content
  misc_feature (30)..(80): Pfam Name: TFIID_30kDa PFAM Desc: Transcription initiation factor TFIID 23
  misc_feature: Homolog of GI Number: 39545934 NR Desc: TAF10
  misc_feature: Homolog of GI Number: 28416879 NR Desc: At4g31720
  misc_feature: Homolog of GI Number: 41529318 NR Desc: TATA box
  misc_feature: Homolog of GI Number: 50726325 NR Desc: putative TATA box
  misc_feature: Homolog of GI Number: 68369036 NR Desc:  similar to Transcription initiation factor TFIID subunit 10
  misc_feature: Homolog of GI Number: 66514520 NR Desc:  similar to TAF10 RNA polymerase II
  misc_feature: Homolog of GI Number: 62859727 NR Desc: TAF10
  misc_feature: Homolog of GI Number: 58386362 NR Desc: ENSANGP00000013303
  misc_feature: Homolog of GI Number: 61866430 NR Desc:  similar to TAF10 RNA polymerase II
  misc_feature: Homolog of GI Number: 57102914 NR Desc:  similar to Transcription initiation factor TFIID subunit 10
MNQNPQSSDGRNDDDSALSDFLASLMDYTPTIPDELVEHYLAKSGFQCPDVRLTRLVAVATQKFVAEVAGDALQHCKARQATIPKDKRDKQQKDKRLVLTMEDLSKALREYGVNLRHQEYFADSPSTGMDPATREE

SEQ ID NO: 10185 - DNA, 855 bp, Glycine max
  misc_feature: Ceres CLONE ID no. 1608697
  misc_feature: Ceres CDNA ID no. 29191646
  CDS (54)..(719): REFERENCED BY SEQ ID NO: 10186
aatacatatcactttcttcaccgttcgctctttctttctcccctacacaaaacatggctttgcccaatcagcaaaccgtcgattaccccagcttcaagcttgtcatcgtcggcgacggtggcacaggaaagacaaccttcgtgaagaggcatctcactggtgaattcgagaagaaatatgaaccgaccattggtgtggaggttcatccgttggattttttcacgaactgtggaaagattcgcttctattgttgggatactgctgggcaagagaagtttggtggcctcagagatggatattatatccatgggcaatgtgcgattatcatgtttgatgttactgcccgtctaacatacaaaaatgtccctacctggcaccgtgatctttgccgggtctgtgaaaacatcccaattgttctttgcggtaacaaggttgatgtcaagaataggcaagtgaaggcaaagcaggttactttccacaggaagaagaatttgcagtactatgagatatctgctaagagcaactacaattttgaaaagccatttttgtacttggccaggaaacttgcaggcgatgctaacttgcactttgtagaatctcctgcattggctccaccagaagttcaaattgatttagctgcacaacaacagcacgaggctgagcttcttgcagctgctagtcagccccttcctgacgacgatgatgatcaatttgagtaggaattgtgggtctgtggatcattttacttagttaatggtatttgtgtatgctacaatgtgtctttggggttgtattattgacatttttttacgtggatttgaggatttaaaattaatcaaaaaaaaaaaaaaaaaa

SEQ ID NO: 10186 - protein, 221 aa, Glycine max
  misc_feature: Ceres CLONE ID no. 1608697
  misc_feature: Ceres CDNA ID no. 29191646
  misc_feature (15)..(173): Pfam Name: Ras PFAM Desc: Ras family
  misc_feature: Homolog of GI Number: 21435991 NR Desc: AT5g55190/MCO15_14
  misc_feature: Homolog of GI Number: 23397164 NR Desc: putative small Ras GTP
  misc_feature: Homolog of GI Number: 20149262 NR Desc: GTP
  misc_feature: Homolog of GI Number: 10334503 NR Desc: GTP
  misc_feature: Homolog of GI Number: 48249482 NR Desc: RAN
  misc_feature: Homolog of GI Number: 2058280 NR Desc: atran3
  misc_feature: Homolog of GI Number: 395072 NR Desc: guanine nucleotide regulatory protein
  misc_feature: Homolog of GI Number: 1172835 NR Desc: GTP
  misc_feature: Homolog of GI Number: 23397041 NR Desc: putative RAN2 small Ras GTP
MALPNQQTVDYPSFKLVIVGDGGTGKTTFVKRHLTGEFEKKYEPTIGVEVHPLDFFTNCGKIRFYCWDTAGQEKFGGLRDGYYIHGQCAIIMFDVTARLTYKNVPTWHRDLCRVCENIPIVLCGNKVDVKNRQVKAKQVTFHRKKNLQYYEISAKSNYNFEKPFLYLARKLAGDANLHFVESPALAPPEVQIDLAAQQQHEAELLAAASQPLPDDDDDQFE

SEQ ID NO: 10187 - DNA, 704 bp, Glycine max
  misc_feature: Ceres CLONE ID no. 1608717
  misc_feature: Ceres CDNA ID no. 25402331
  CDS (139)..(474): REFERENCED BY SEQ ID NO: 10188
ctatatcctcttctttcccctcctacacaaggaaggacagcgataaaatcagccctaaaggctcttctcattctcttttacattccaaagccaaaaaaaaaaaaaaaaaaactcactaccctaccctacccttttgaaatgaacttcaaaccctggctctctttcctcctcttggccctggccttggccatggtggctgaggcttctagtgttcatcatgaatatggctttcatggtgctgctgtggtccatgatctcattggagatgacaatgagatgttgcttgattcagagaccaatcgtcgaacgctcgctggccggcaacagtacattagctatggtgccctaaatgccaacaatgtgccatgtggtaaccgtggaagatcctactacaattgccagcagaggggtcgtgccaacccttacaatcgtggttgcacgcaaatcacacattgtgctagagacaccagctagatgaacaagtgatgaagctggaaagggagatatatgatatataattatgttatataataagtattaattgtggctggcttttgttctatggattaagattctagaataacttatgtgagttcttgtcacacttacctatataggcttcccattgaacaaattttattttaatttgttggggaggttatttaattaattgtttgtttgttcaaaaaaaaaaaaaaaaaaaa

SEQ ID NO: 10188 - protein, 111 aa, Glycine max
  misc_feature: Ceres CLONE ID no. 1608717
  misc_feature: Ceres CDNA ID no. 25402331
  misc_feature (42)..(108): Pfam Name: RALF PFAM Desc: Rapid ALkalinization Factor
  misc_feature: Homolog of GI Number: 44917505 NR Desc: At2g33775
  misc_feature: Homolog of GI Number: 28628203 NR Desc: rapid alkalinization factor 1 precursor
  misc_feature: Homolog of GI Number: 16566316 NR Desc: RALF precursor
  misc_feature: Homolog of GI Number: 37695573 NR Desc: rapid alkalinization factor 2
  misc_feature: Homolog of GI Number: 42374767 NR Desc: rapid alkalinization factor preproprotein
  misc_feature: Homolog of GI Number: 48766856 NR Desc: rapid alkalinization factor 1
  misc_feature: Homolog of GI Number: 21593878 NR Desc: RALF precursor
  misc_feature: Homolog of GI Number: 28628205 NR Desc: rapid alkalinization factor 2 precursor
  misc_feature: Homolog of GI Number: 18414108 NR Desc: rapid alkalinization factor
MNFKPWLSFLLLALALAMVAEASSVHHEYGFHGAAVVHDLIGDDNEMLLDSETNRRTLAGRQQYISYGALNANNVPCGNRGRSYYNCQQRGRANPYNRGCTQITHCARDTS

SEQ ID NO: 10189 - DNA, 931 bp, Glycine max
  misc_feature: Ceres CLONE ID no. 1608896
  misc_feature: Ceres CDNA ID no. 35383475
  CDS (37)..(651): REFERENCED BY SEQ ID NO: 10190
gactgagagcaattgcatcaacaacaaattgaaaggatgtcgatcttcgagtacaacggaagcgccgtggtggctatggtcggcaggaactgcttcgccattgccagcgaccgaaggctcggcgttcagctccaaaccatagccacggatttccaacgcatttccaagattcacgacaagctcttcatcgctctctctggcctcgccaccgatgctcaaacattgtatcagcgtcttgttttccggcacaaactgtatcagcttcgtgaagagagggatatgaaaccagagacctttgccagcttagtctctgctctgctttatgagaaaaggtttggtccatacttttgtcagcctgtaattgctggattaggggatgaagacaaaccattcatctgcacaatggattgtcttggggcaaaggagcttgcaaaagattttgttgtttctgggactgcatctgagtctctgtatggtgcttgtgaggcgatgtttaagcctgacatggaaccagaggaattgtttgagaccatctcccaagcactgctatcatctgtagatcgtgattgtttgagtggctggggaggacatgtctatgttgtcacgccaaccgaagtgaaggaaaggattttgaagggaaggatggattaacttgtaagccacctgagttttctgtttagtttggagttgaatggcatgacatttacaatcctttgttaaagggtacctttgttattgtggctctttagataaatgtatcctgaaaattatttatagacggttcacttgttctatattttagattatcagtgaaaggaggagattcttgagttgggcatgttgtgagtgatctattggaatgtttttcagtgcagactggcatgcaaagcacgataatgatactagaattgcctcaaaaaaaaaaaaaaaa

SEQ ID NO: 10190 - protein, 204 aa, Glycine max
  misc_feature: Ceres CLONE ID no. 1608896
  misc_feature: Ceres CDNA ID no. 35383475
  misc_feature (5)..(189): Pfam Name: Proteasome PFAM Desc: Proteasome A
  misc_feature: Homolog of GI Number: 21387087 NR Desc: proteasome subunit
  misc_feature: Homolog of GI Number: 12744997 NR Desc: putative 20S proteasome beta subunit PBC2
  misc_feature: Homolog of GI Number: 21553663 NR Desc: putative 20S proteasome beta subunit PBC2
  misc_feature: Homolog of GI Number: 19548049 NR Desc: At1g77440/T5M16_3
  misc_feature: Homolog of GI Number: 50905713 NR Desc: Proteasome subunit beta type 3
  misc_feature: Homolog of GI Number: 51535468 NR Desc: 20S proteasome subunit beta type 3
  misc_feature: Homolog of GI Number: 2982322 NR Desc: probable proteasome subunit
  misc_feature: Homolog of GI Number: 14594927 NR Desc: putative beta 3 proteasome subunit
  misc_feature: Homolog of GI Number: 47028283 NR Desc: proteasome beta subunit
  misc_feature: Homolog of GI Number: 50760756 NR Desc:  similar to Zgc:56374
MSIFEYNGSAVVAMVGRNCFAIASDRRLGVQLQTIATDFQRISKIHDKLFIALSGLATDAQTLYQRLVFRHKLYQLREERDMKPETFASLVSALLYEKRFGPYFCQPVIAGLGDEDKPFICTMDCLGAKELAKDFVVSGTASESLYGACEAMFKPDMEPEELFETISQALLSSVDRDCLSGWGGHVYVVTPTEVKERILKGRMD

SEQ ID NO: 10191 - DNA, 1118 bp, Glycine max
  misc_feature: Ceres CLONE ID no. 1608906
  misc_feature: Ceres CDNA ID no. 29191462
  CDS (88)..(840): REFERENCED BY SEQ ID NO: 10192
attaagcaccaacgagtaaaccactctctcctactatcttttaaatccttttgtaccctcaactccataagccactagtacctcacaatgcccattgtagcaacctctcttctcttctttcttcttaatttatgcctcagaggcacttatgctgactatggaggtggttggcaaggtggtcatgccacattttatggtggaggtgatgcatctggcacaatgggaggggcttgtggatatggaaatttgtacagccaagggtatggcactaacactgcagcactcagcactgctctattcaacaatggcatgagttgcgggtcttgctatgagatgaaatgtgacactgaccccaaatggtgcctccccggtagcataatcgttactgccacaaacttctgcccccctaactttgcattggctaacaacaatggtggctggtgcaaccctcctttgcaacactttgatcttgctgagcctgctttcttgcaaattgctcaatacaaagctggaattgttccagtttccttcagaagagtctcctgtgtgaagaaaggagggatcaggttcaccatcaatggtcactcttacttcaacttggttctcatcacaaatgttggtggagctggagatgttcattctgtgtccatcaaagggtctagaactgggtggcaaaccatgtctagaaactgggggcagaattggcaaagcaactcctacctgaatggccaaagcctctcttttcaggtcactacaagtgatggcaggactctcactagcaacaacattgtgcctgctaactggcaatttggacaaacatttgaaggggcacagttctaggaaccttaatgatttttaagtacacattaatttgtgtgtaatatatgatggcattgttcactagtttttgttatagttggaaagggtggggaaagagaagaaacgaaggtagattaggagtagtttctggccaacatggcccctaatgctgtggtggctatatggcacccgctaggcctaatataatatatagtcttttattttatatctatcatctcattgataaatgccttttgatgaagtaaaaggtgttgatgatcccaaaaaaaaaaaaaaaa

SEQ ID NO: 10192 - protein, 250 aa, Glycine max
  misc_feature: Ceres CLONE ID no. 1608906
  misc_feature: Ceres CDNA ID no. 29191462
  misc_feature: null
  misc_feature: Useful for making plants with altered cell wall content and/or composition
  misc_feature (159)..(236): Pfam Name: Pollen_allerg_1 PFAM Desc: Pollen allergen
  misc_feature (63)..(148): Pfam Name: DPBB_1 PFAM Desc: Rare lipoprotein A
  misc_feature: Homolog of GI Number: 29467501 NR Desc: expansin
  misc_feature: Homolog of GI Number: 29467499 NR Desc: expansin
  misc_feature: Homolog of GI Number: 11907554 NR Desc: expansin
  misc_feature: Homolog of GI Number: 13898649 NR Desc: expansin
  misc_feature: Homolog of GI Number: 82568704 NR Desc: Expansin
  misc_feature: Homolog of GI Number: 3510540 NR Desc: expansin
  misc_feature: Homolog of GI Number: 6646885 NR Desc: expansin
  misc_feature: Homolog of GI Number: 3510538 NR Desc: expansin
  misc_feature: Homolog of GI Number: 11932092 NR Desc: alpha
  misc_feature: Homolog of GI Number: 13898651 NR Desc: expansin
MPIVATSLLFFLLNLCLRGTYADYGGGWQGGHATFYGGGDASGTMGGACGYGNLYSQGYGTNTAALSTALFNNGMSCGSCYEMKCDTDPKWCLPGSIIVTATNFCPPNFALANNNGGWCNPPLQHFDLAEPAFLQIAQYKAGIVPVSFRRVSCVKKGGIRFTINGHSYFNLVLITNVGGAGDVHSVSIKGSRTGWQTMSRNWGQNWQSNSYLNGQSLSFQVTTSDGRTLTSNNIVPANWQFGQTFEGAQF

SEQ ID NO: 10193 - DNA, 571 bp, Glycine max
  misc_feature: Ceres CLONE ID no. 1608911
  misc_feature: Ceres CDNA ID no. 25891797
  CDS (60)..(434): REFERENCED BY SEQ ID NO: 10194
actcttcacagaaacatcgagcagcagaagaaagaaactacagaaaaaagaaaaaagacatggcttccacttctgcagtttcattggctatgccagtaacttatgccagccagaagagggtactggtgcctagctctgatgcattattcctcaagccactgcctctacgttcttattcttccaaggcaatggcagcatcaaaagtacccaatggaaggtttcaggtgagggcttccatgaaggagaaagttgtgacaggcctcacagcagctgcattcacagcctcaatgatggctcctgatgtggccgaggccgccgtttcgccttctctcaagaacttcttgctcagcatcgccgccggtggtgttgttgttgctgccattatcggtgcggtggtcggggtttccaatttcgatcccgtcaagcgaagctgatcgatatatcaagttctcaggcactactgtgttttttcttttttttttttgttacctcttgtcataatatttgtaatgttcttcagaaatgaagtgaaccctctctcttgtgtgtactaaaaaaaaaaaaaaaaaaa

SEQ ID NO: 10194 - protein, 124 aa, Glycine max
  misc_feature: Ceres CLONE ID no. 1608911
  misc_feature: Ceres CDNA ID no. 25891797
  misc_feature (87)..(124): Pfam Name: PsbX PFAM Desc: Photosystem II reaction centre X protein
  misc_feature: Homolog of GI Number: 33520421 NR Desc: ultraviolet
  misc_feature: Homolog of GI Number: 45356861 NR Desc: ultraviolet
  misc_feature: Homolog of GI Number: 18476498 NR Desc: ultraviolet
  misc_feature: Homolog of GI Number: 50939905 NR Desc: putative ultraviolet
MASTSAVSLAMPVTYASQKRVLVPSSDALFLKPLPLRSYSSKAMAASKVPNGRFQVRASMKEKVVTGLTAAAFTASMMAPDVAEAAVSPSLKNFLLSIAAGGVVVAAIIGAVVGVSNFDPVKRS

SEQ ID NO: 10195 - DNA, 835 bp, Glycine max
  misc_feature: Ceres CLONE ID no. 1609079
  misc_feature: Ceres CDNA ID no. 25446208
  CDS (259)..(693): REFERENCED BY SEQ ID NO: 10196
aaaacttcaaagccctcctttgcctctctctcttcgcttattgttgcaccttcctcgtaaaagataactcccggtcggcgtgcatagccgccgattgaggcaaaaaaaaaacacaaaacacactgtagctcatcacagccaaacgcggcgtcaacgatgacgagcttctgaaattccaacttcgcccttcttctctgtgtatattcttttttatttatttattattatttctattattttttcggtgaggttagctccatgcctagtcccaagagcagccgcagcggccagatcgagagtcaccggaggggaaggtcgtcgtccttccacggccagtgcgcgatgtctgtcggtcagctccaccgtccgaagacggtttccgacctcccgtcgctcagaagcctcgccggaacggcgccggcgcctatgccggagggattgcctagacagccgccgaagatgctgctgaaggtgacggtgctgagaagcctcgcgcccgtgcaggtgctgatgacgccgggatccaccgtccgcgacctgatagcggcggcggtgcggcagtacgtgaaggaaggtcgccggccaatcttgccgtccagcgaagtctccgaattcgacctccattattcgcagtttagcctagaaagtaaatctctaataaattacgaacaaaatgtagatataatttcataaatagtttctaatcatagaattagagtttcatctcaacgttgataattgttggaatcgcgaattatcgaagtgaaattgtaattttgctcaggaaatagttctaaactacctctaactttattcacaaaaaaaaaaaaaaaaa

SEQ ID NO: 10196 - protein, 144 aa, Glycine max
  misc_feature: Ceres CLONE ID no. 1609079
  misc_feature: Ceres CDNA ID no. 25446208
  misc_feature: Homolog of GI Number: 38347592 NR Desc: OSJNBa0042I15.5
  misc_feature: Homolog of GI Number: 70664003 NR Desc: OSJNBa0042I15.6
  misc_feature: Homolog of GI Number: 50252113 NR Desc: pentatricopeptide
MPSPKSSRSGQIESHRRGRSSSFHGQCAMSVGQLHRPKTVSDLPSLRSLAGTAPAPMPEGLPRQPPKMLLKVTVLRSLAPVQVLMTPGSTVRDLIAAAVRQYVKEGRRPILPSSEVSEFDLHYSQFSLESKSLINYEQNVDIIS

SEQ ID NO: 10197 - DNA, 920 bp, Glycine max
  misc_feature: Ceres CLONE ID no. 1609090
  misc_feature: Ceres CDNA ID no. 36707550
  CDS (45)..(821): REFERENCED BY SEQ ID NO: 10198
atagtgctaggaaagtgagtgagagaaagagatcacatagcagaatggcttctactcaatgtttcttgcaccaccatgctcttaccacccctgccagatccccatcacaacgcatcatggttagcaccaagcctaaccagcttgtttgcaaggcacagaagcaagaggatattgatgtcagcccaatctctcgccggttagctctaaccgtgctcattggtgctgctgctgttggctccaaagtccaacctgctgatgcagcttatggggaagctgccaatgtgtttggaaagccaaagacagacacagatttcctgccatacaatggagatggattcaaactatcgattccctcaaagtggaacccaagcaaagaggttgagtacacaggtcaggttgttagatatgaggataactttgattcaaccaccaacgtggttgtcaccatcactccgactgataagaagtctatcactgactatggttcacccgaagagttcctctctaaggtggattatttactaggaaaacaggccttcttcggcgaaacacaagccgagggtggttttgatccaaatgcggtggccacggctaacatcttagagacggcaacacctgtgattgatgggaagccgtactattttctgtctgtgttgacaaggactgctgatggagatgaaggtggcaagcaccacataattagagcaactgtaaaagatggaaaactgttcatttgcaaggctcaagctggagacaagaggtggttcaagggagcaagaagatttgtggagagtgcagcaagttctttcagtgttgcttaaaaatcttcaataatagctggttatatatatctgctatgtgtaaatctaccttaagtgctatctatgtttgaagttgtctaaaaaaaaaaaaaaaaaaaa

SEQ ID NO: 10198 - protein, 258 aa, Glycine max
  misc_feature: Ceres CLONE ID no. 1609090
  misc_feature: Ceres CDNA ID no. 36707550
  misc_feature: null
  misc_feature: Useful for making plants with altered Lignin content
  misc_feature (56)..(258): Pfam Name: PsbP PFAM Desc: PsbP
  misc_feature: Homolog of GI Number: 19911 NR Desc: photosystem II 23kDa polypeptide
  misc_feature: Homolog of GI Number: 19317 NR Desc: photosystem II 23 kDa protein
  misc_feature: Homolog of GI Number: 21265 NR Desc: 23 kDa OEC protein
  misc_feature: Homolog of GI Number: 1771778 NR Desc: 23 kDa oxygen evolving protein of photosystem II
  misc_feature: Homolog of GI Number: 52000814 NR Desc: Oxygen
  misc_feature: Homolog of GI Number: 11134156 NR Desc: Oxygen
  misc_feature: Homolog of GI Number: 20465405 NR Desc: putative 23 kDa polypeptide of oxygen
  misc_feature: Homolog of GI Number: 11133884 NR Desc: Oxygen
  misc_feature: Homolog of GI Number: 1345550 NR Desc: 23
  misc_feature: Homolog of GI Number: 32307610 NR Desc: photosystem II protein PsbP
MASTQCFLHHHALTTPARSPSQRIMVSTKPNQLVCKAQKQEDIDVSPISRRLALTVLIGAAAVGSKVQPADAAYGEAANVFGKPKTDTDFLPYNGDGFKLSIPSKWNPSKEVEYTGQVVRYEDNFDSTTNVVVTITPTDKKSITDYGSPEEFLSKVDYLLGKQAFFGETQAEGGFDPNAVATANILETATPVIDGKPYYFLSVLTRTADGDEGGKHHIIRATVKDGKLFICKAQAGDKRWFKGARRFVESAASSFSVA

SEQ ID NO: 10199 - DNA, 878 bp, Glycine max
  misc_feature: Ceres CLONE ID no. 1609121
  misc_feature: Ceres CDNA ID no. 25446209
  CDS (63)..(605): REFERENCED BY SEQ ID NO: 10200
gactcactcttgttttcgcttcgctactcatcatcctaagaagtaccaggaagaaacaaacaatgtttctcaaagtccagctgcactggaatgtcatcatcgctgctgaaaatctgcaaccggaaggtctgatgcttcatagggcaatcattgtccgccttctgagtgactttgctgtgaagaaggccaccaaagatctgggatactttcttgcagtgaccacactggagaaaataggggaaggaaaggtcagacaacatactggggatgtgctcttccctgtggtttttaatgtcatcaccttcaagtttttcaagggtgagatattagagggtgttgtccacaaggttctgaagcatggagttttcatgagatgtggtccaattgagaatgtctatctctcaaatttgaagatgcctgattaccgatatgttcctggcgaaaacgcatgcttcatgaatgacaaaatgtcaaagattggaaaagatgtcacggtccgcttctcggtgataggtacaaagtggatggaagcagaaagggaatttcaggcattggtcagtttggaaggggattatctgggaccaatttcaactccggatatttagctacattttctttgttgccttgtcttctgaaatggatgaaatattttccatatgaagtcagttcttgtaattaatgataactctgtctgccttccttttagaactgtgatttccggcttgtgtacgggatacactagtgaaatctgggaccaatttcaactccggatatttagctacattttctttgttgccttgtcttctgaaatagatgaaatattttccatatgaagtcagttcttgtaattaatgataagaaaaaaaaaaaaaaaaaaa

SEQ ID NO: 10200 - protein, 180 aa, Glycine max
  misc_feature: Ceres CLONE ID no. 1609121
  misc_feature: Ceres CDNA ID no. 25446209
  misc_feature (1)..(81): Pfam Name: RNA_pol_Rpb7_N PFAM Desc: RNA polymerase Rpb7
  misc_feature: Homolog of GI Number: 42566796 NR Desc: RNA polymerase Rpb7 N
  misc_feature: Homolog of GI Number: 7268172 NR Desc: RNA polymerase II fifth largest subunit like protein
  misc_feature: Homolog of GI Number: 21553765 NR Desc: RNA polymerase II fifth largest subunit
  misc_feature: Homolog of GI Number: 50932157 NR Desc: putative RNA polymerase II fifth largest subunit
  misc_feature: Homolog of GI Number: 57863806 NR Desc: putative receptor kinase
  misc_feature: Homolog of GI Number: 50933363 NR Desc: putative receptor kinase
  misc_feature: Homolog of GI Number: 11994719 NR Desc: RNA polymerase II fifth largest subunit
  misc_feature: Homolog of GI Number: 38603938 NR Desc: At4g14520
  misc_feature: Homolog of GI Number: 322700 NR Desc: RNA polymerase II fifth largest subunit
  misc_feature: Homolog of GI Number: 65305497 NR Desc: DNA
  misc_feature: Useful for making stronger plants
MFLKVQLHWNVIIAAENLQPEGLMLHRAIIVRLLSDFAVKKATKDLGYFLAVTTLEKIGEGKVRQHTGDVLFPVVFNVITFKFFKGEILEGVVHKVLKHGVFMRCGPIENVYLSNLKMPDYRYVPGENACFMNDKMSKIGKDVTVRFSVIGTKWMEAEREFQALVSLEGDYLGPISTPDI

SEQ ID NO: 10201 - DNA, 915 bp, Glycine max
  misc_feature: Ceres CLONE ID no. 1609165
  misc_feature: Ceres CDNA ID no. 35383476
  CDS (201)..(680): REFERENCED BY SEQ ID NO: 10202
ttgtgaattcgaaccaatttgttcttctcttctctctatcgtcttcttcctctgttccattagggtttccttttctccctcggagcttccaattgaaatccaattcctcaatacctccacactttctcgttcggaaagctcgcgaattcgaaagacatcgacggctccacgtgatacgttttcttcctctctggttatcaatgttggctactagtgcagttgcatctttgcccgtattaccaccagtgagaagaggtggccaccacattgaacagaatgttgtttccacattgagctttccaagacgattactgacaactaataattcaatacctctgagtggtacacagtttccatttggcagaagagctcattctactcacacagcaactataatatgtgctgcagctttgaatgcaagatgtggtgcagagcaaacccaaaccgttactcgccaggctcctacaattactcatgttcctggcaaggagaagtcgccacaacttgacgatggtggaactggatttccacctcgtgatgatgatgatggcggtggtggaggaggtggaggcggaggcaactggtctggtggattcttcttttttgggtttcttgcttttcttggcttcttaaaggataaggaaactgatgacacatacagggatgaccgaagaaggtgaaagcattggccaccacagatgcatgcttttgcttggagtattttttctgctttatttgttgatttcctctcttatatatgcataccgtagattacattggtcaactgaggttctgtgcttgcttatgatcatgtaatgcgcagaattttgtatgttacaaattaaatcccacttgaaactttagtatggaaggaaataccgtgataattagtatcaaaaaaaaaaaaaaaaaaaa

SEQ ID NO: 10202 - protein, 159 aa, Glycine max
  misc_feature: Ceres CLONE ID no. 1609165
  misc_feature: Ceres CDNA ID no. 35383476
  misc_feature: Homolog of GI Number: 6634770 NR Desc: F26G16.9
MLATSAVASLPVLPPVRRGGHHIEQNVVSTLSFPRRLLTTNNSIPLSGTQFPFGRRAHSTHTATIICAAALNARCGAEQTQTVTRQAPTITHVPGKEKSPQLDDGGTGFPPRDDDDGGGGGGGGGGNWSGGFFFFGFLAFLGFLKDKETDDTYRDDRRR

SEQ ID NO: 10203 - DNA, 1011 bp, Glycine max
  misc_feature: Ceres CLONE ID no. 1609181
  misc_feature: Ceres CDNA ID no. 35383477
  CDS (125)..(775): REFERENCED BY SEQ ID NO: 10204
atctttccgttttgagttcactgtggctcttctccactgtcgttttgcttctcccttttccgttctcattcaaaccctaatctgtccctcagatcccaaaattaccccaaattgagaacttgccatggcagcaatgtccgattcggttcgttccctcgcacttctctcccttgcagtgatgtgtagcgtcgcgaattcgatgcggttcgaccttcaatcgggtcaaaccaagtgcatttcagaggacattaagactaacgcgatgagcgtgggaaagtacagtgtcgttaatccccaagaaggttacccacttcccgattcccacaggatcattgtcaaggtgacgtcgcctcatgcgcacacatatcactttggagatcatgtggattctggtaattatgcatttacggcatctgaggctggtgactactcagcttgcttttgggtacaggataccagggatgccccgtcggtggtaactattgaatttgagtggagaactggggttgctgccaaagattggtcaaaggttgccaagaaagggcagattgaagtaatggaatttgagttgaagaagctatatgatactgtcctatccatccatgacgagatgttttatcttcgagaaagggaggaagagatgcaagatcttaacaaagcaacaaacagcaagatgtttaccttcagtttcctttcgattgtggtttgcttgtctgtggctggtttgcaactatggcatttgaagacattctttgagaggaagaagctcctctaagttcatcacacgaattttgttcatctggcttctgaattttttattttctgtacctggttgttccttgtgtatccaaatgtatgattagttcatctttcacttttacattttatggtaattagaattgttgcccatcgcaagtcatattaaatgtatgctacaattatgaaccggtattaacttagaaataatagttacatttcttaacaggccctcaaaaaaaaaaaaaaaaaaaa

SEQ ID NO: 10204 - protein, 216 aa, Glycine max
  misc_feature: Ceres CLONE ID no. 1609181
  misc_feature: Ceres CDNA ID no. 35383477
  misc_feature (58)..(124): Pfam Name: EMP24_GP25L PFAM Desc: emp24/gp25L/p24 family
  misc_feature: Homolog of GI Number: 50939421 NR Desc: putative transmembrane protein
  misc_feature: Homolog of GI Number: 18396016 NR Desc: emp24/gp25L/p24 family protein
  misc_feature: Homolog of GI Number: 26450391 NR Desc: putative transmembrane protein
  misc_feature: Homolog of GI Number: 50920701 NR Desc: putative transmembrane protein
  misc_feature: Homolog of GI Number: 8778403 NR Desc: F16A14.23
  misc_feature: Homolog of GI Number: 4335768 NR Desc: putative Golgi
  misc_feature: Homolog of GI Number: 11994711 NR Desc: golgi
  misc_feature: Homolog of GI Number: 50913141 NR Desc: emp24/gp25L/p24
  misc_feature: Homolog of GI Number: 70869160 NR Desc: COP
MAAMSDSVRSLALLSLAVMCSVANSMRFDLQSGQTKCISEDIKTNAMSVGKYSVVNPQEGYPLPDSHRIIVKVTSPHAHTYHFGDHVDSGNYAFTASEAGDYSACFWVQDTRDAPSVVTIEFEWRTGVAAKDWSKVAKKGQIEVMEFELKKLYDTVLSIHDEMFYLREREEEMQDLNKATNSKMFTFSFLSIVVCLSVAGLQLWHLKTFFERKKLL

SEQ ID NO: 10205 - DNA, 945 bp, Glycine max
  misc_feature: Ceres CLONE ID no. 1609278
  misc_feature: Ceres CDNA ID no. 25402485
  CDS (105)..(635): REFERENCED BY SEQ ID NO: 10206
aaaatattggtatagccgcgagcgaggtttcgtttcgttcagttcacacattctaatctctatcgattcctcttccattttctcaattcactacaccccagtttatgggaagccaacttgtgtgtaatgggtgtaggaacatcttggtttaccctagaggagcaaccaatgtttgctgtgcattgtgcaacaccgttacctctgttcctcctcctggaatggacatgtcacaactttattgtggaggctgtacgacattgctaatgtacacacgtggtgctacaagtgtgagatgttcctgctgtcacactattaaccttgtaccagtactagaatctaatcaagtcattcattgtacgaactgccggacaacactcatgtatccttatggagcttcctcagtaaaatgtgcaatttgtcgctatattactaatgtcagtatgacgaatggaaggcttccaattcctgtacagagaccaaatggaacagccaactctggaacagtatcttctacttcatcgtcaatgcctcattctcagagccaaactgtcgtagtagaaaatcccatgtctgttgattcgagtgggaaattggtgagcaatgttgttgtgggcgttacaacagagaagaaatgatacttgtcacattatcatgttatacaagtgtaaagagaacattatttgattcatcagctgctggtgctcaaagatattgttcgtatatgtgactttgcagcatagaagttaaaaatatttttgttctaaacgacatttagactgatttaatttacgtatatgaatacgaggacaagtggaaagggcacaaaacttgtcatttgtgcaattgcctaggtcctctttttgctgtagttggatcacagggtttttcacatctcgaattacaagtcgtagatgcacatttgtttccaaaaaaaaaaaaaaaaaa

SEQ ID NO: 10206 - protein, 176 aa, Glycine max
  misc_feature: Ceres CLONE ID no. 1609278
  misc_feature: Ceres CDNA ID no. 25402485
  misc_feature (53)..(91): Pfam Name: PqiA PFAM Desc: Paraquat
  misc_feature: Homolog of GI Number: 21436207 NR Desc: putative zinc
  misc_feature: Homolog of GI Number: 7268834 NR Desc: zinc
  misc_feature: Homolog of GI Number: 17981380 NR Desc: zinc finger protein LSD2
  misc_feature: Homolog of GI Number: 77556573 NR Desc: zinc finger protein LSD1
  misc_feature: Homolog of GI Number: 17981378 NR Desc: zinc finger protein LSD1
  misc_feature: Homolog of GI Number: 50881432 NR Desc: zinc finger protein
  misc_feature: Homolog of GI Number: 42406064 NR Desc: zinc finger protein LSD1
  misc_feature: Homolog of GI Number: 40809629 NR Desc: zinc finger protein
  misc_feature: Homolog of GI Number: 33867796 NR Desc: LSD1
  misc_feature: Homolog of GI Number: 42570227 NR Desc: zinc finger protein
MGSQLVCNGCRNILVYPRGATNVCCALCNTVTSVPPPGMDMSQLYCGGCTTLLMYTRGATSVRCSCCHTINLVPVLESNQVIHCTNCRTTLMYPYGASSVKCAICRYITNVSMTNGRLPIPVQRPNGTANSGTVSSTSSSMPHSQSQTVVVENPMSVDSSGKLVSNVVVGVTTEKK

SEQ ID NO: 10207 - DNA, 470 bp, Glycine max
  misc_feature: Ceres CLONE ID no. 1609355
  misc_feature: Ceres CDNA ID no. 36706702
  CDS (48)..(233): REFERENCED BY SEQ ID NO: 10208
ctgttccgcagaaaaccctagcccaaccggatcttcacgactaggagatggcaaagtcgaagaaccacaccgctcacaaccagtcctacaaggcccataagaatggcatcaaaaagccaaagaggcatcgccacacttccaccaaagggatggatccaaagtttctgaggaaccagaggtacgcgaggaagcataacaagaagagcggtgaaacagccaccgaagaagagtaaagtgccactctcaaatgggcctattaggatttgatttgttatttaagccccatatgttttgtgtcgaatctatctttagtagtatagtcatttttatgagttaacttaatccagagagaatgcagtacttactcttatagcatcgttgttggtttttgttaaggacccttgaaattttatcaatggattattattcagttgtttatgcttttcagtgaaaaaaaaaaaaaaaaaaaa

SEQ ID NO: 10208 - protein, 61 aa, Glycine max; identical to SEQ ID NO: 10166
  misc_feature: Ceres CLONE ID no. 1609355
  misc_feature: Ceres CDNA ID no. 36706702
  misc_feature (4)..(42): Pfam Name: Ribosomal_L29e PFAM Desc: Ribosomal L29e protein family
  misc_feature: Homolog of GI Number: 7959366 NR Desc: ribosomal protein L29
  misc_feature: Homolog of GI Number: 34905656 NR Desc: P0475H04.11
  misc_feature: Homolog of GI Number: 30679956 NR Desc: 60S ribosomal protein L29
  misc_feature: Homolog of GI Number: 7549643 NR Desc: ribosomal protein L29
  misc_feature: Homolog of GI Number: 7549645 NR Desc: ribosomal protein L29
  misc_feature: Homolog of GI Number: 27764982 NR Desc: At3g06680
  misc_feature: Homolog of GI Number: 12231298 NR Desc: ripening regulated protein DDTFR19
  misc_feature: Homolog of GI Number: 51010951 NR Desc: zgc:92868
  misc_feature: Homolog of GI Number: 72051829 NR Desc:  similar to 60S ribosomal protein L29
  misc_feature: Homolog of GI Number: 66534184 NR Desc:  similar to ENSANGP00000021901

SEQ ID NO: 10209 - DNA, 599 bp, Glycine max
  misc_feature: Ceres CLONE ID no. 1609389
  misc_feature: Ceres CDNA ID no. 35383478
  CDS (15)..(434): REFERENCED BY SEQ ID NO: 10210
agaaagagaaagcaatggcttctctggcaagcttagctgttgttcaaccatctactgtcaagggccttgctggaactaagctctctttcaagccctctcgccagagcttcagacccaagaatttcaggagtggtgccgttgtagcaaagtacggtgacaagagtgtgtactttgatttggaggatctaggcaacactactggtcagtgggacttgtacggctccgatgcaccttcaccctacaaccctcttcagagcaagttcttcgagacattcgccgctccattcacaaagaggggattgttactaaagtttttgatcctgggaggtggttccaccctggcatacttgagtgccacagcgtcaggtgacattctaccaatcaagaagggcccacaacttccaccaaagccaggtccccgtggcaagatctaattttgtttcccaattccatctgtttagctccttcccctcccccttcttcttcttctcttgaattgaacatgtatatctctatttgcatacaatgtgtaagtacgcctaaagcctacttctattaaattatgttcatttctggtccaaaaaaaaaaaaaaaaaaaa

SEQ ID NO: 10210 - protein, 139 aa, Glycine max; identical to SEQ ID NO: 10156
  misc_feature: Ceres CLONE ID no. 1609389
  misc_feature: Ceres CDNA ID no. 35383478
  misc_feature (6)..(139): Pfam Name: PSI_PsaH PFAM Desc: Photosystem I reaction centre subunit VI
  misc_feature: Homolog of GI Number: 33520419 NR Desc: photosystem I psaH protein
  misc_feature: Homolog of GI Number: 407353 NR Desc: PSI
  misc_feature: Homolog of GI Number: 397555 NR Desc: photosystem I psaH protein
  misc_feature: Homolog of GI Number: 1916350 NR Desc: PSI
  misc_feature: Homolog of GI Number: 21553440 NR Desc: Photosystem I reaction center subunit VI
  misc_feature: Homolog of GI Number: 407355 NR Desc: PSI
  misc_feature: Homolog of GI Number: 21618081 NR Desc: photosystem I subunit VI precursor
  misc_feature: Homolog of GI Number: 21287 NR Desc: psaH
  misc_feature: Homolog of GI Number: 445929 NR Desc: photosystem I:SUBUNIT=PS I
  misc_feature: Homolog of GI Number: 445928 NR Desc: photosystem I:SUBUNIT=PS I
  misc_feature: Useful for making plants with increased biomass and foliage

SEQ ID NO: 10211 - DNA, 2081 bp, Zea mays
  misc_feature: Ceres CLONE ID no. 1610331
  misc_feature: Ceres CDNA ID no. 40041501
  CDS (436)..(1728): REFERENCED BY SEQ ID NO: 10212
aaaaaaactctgcagccggtcaatgcaagtaggtgggattgcttgtgttgtgtcaattcggacccgcacccgcctaacaaatccagctggtggagtggaggcactgtatcccgtacccactctggcctactccatccaccaaaagtccagggccccaaacggccaaacgcaaaagcgagagcaaagcaagcttcggcctcacctccagcggcaggtggtgctgcggagcttctcctcgccctagatcccgcgcacccaacgccagatcagagatcagggcgcgccggccgtctccattgtccggcggatcctgcgttgcgagctggaccgagagggaggagcgagggagcgcgcgggtagagaaggcggggcggggggaggaaggaaggaaggagcgccggccggagcagacgtcccctcggggccctcggtcggatgagatcgacgatgaaggcgcagcacgccaacgggcgggggagcaggagccccttcctgacgtcctacgcgctcacgctcgccttcatcaccttcgtctccgtgctctactttaaggacttctcctccacgctgcaccgccccttcctccaccgcccccgccgccacgccgccccagacaaaagccaggcggggcgccgcgcggcggcggagcggctgccgttcgcggtgggcgcggcgccggcggggtgtgacgtcgggcgaggggagtgggtgtacgacgacgcggcgcggccgtggtaccaggaggaggagtgcccctacatccagccgcagctcacgtgccaggcgcacggccgccccgaccgggcgtaccagcactggcggtggcagccgcgcgggtgctcgctgcccagcttcaatgcaactctaatgctagagatgttgcggggtaaacgaatgttgtttgttggagattctctgaaccgtgggcaatatgtatctttggtttgcctcctgcaccgaatcatccctgagagctccaagtcaatggagacagttgattcccttacagttttcaaagcaaaggactacaatgccaccattgagttctactgggctccctttctggccgagtcgaattcggatgatgctgttgtgcaccggatcgcggatcggatcgtaagagggacatccattgagaagcatgccaagttttggaagggggctgacatcttggtattcaacacctacctatggtggatgactggacaaaagatgaagattttgcggaactccttcgaagataaaagcaaggatatcatagagatggaaacggaggaagcctatgagatggtacttaatgctgtgctgaaatgggtggagagcaacatgaaccccaggacatcaagaacattctttgtcactatgtcacccacccacacaaggagcagagactggggcgatgatactgacgggaactgctacaaccagacagcccccatcgaggacctgtcctactgggggtcagacaccagcaagggcctgatgcgcgtgatcggagaagtgttcagcgcgtctaagtccaggatccccgtgtgggttgtgaacatcacccagctctccgagtacaggaaggacgcgcacacccagatatacaagaagcagtggaacccgctgaccccggagcaggtcgcggaccctaagagctacgcggactgcacgcactggtgcctgccggggctccaggacacgtggaacgagctgctctactccaagctctttttcccctgagttaaaggtttgagttgcgaggtgcacggtgaagttggggtctctctctggcattggcacgctgcacaatactagttagcttggcattggcccagcagtctgaagatggatgctctgctgcggtatggcatggcatggtattgttgatgtacgattcattcgttggaaaacctggacgtgagtgctggaattgcaccatctggccttttctgtacatgcctgatgtaacggtggtgttgtgtttccccaccaccacctctcttttcacgatgatgacacagtgcatgaatagttgtatggggtaatgtgataatacatactgtaattctctggttcaaaaaaaaaaaaaaaaa

SEQ ID NO: 10212 - protein, 430 aa, Zea mays
  misc_feature: Ceres CLONE ID no. 1610331
  misc_feature: Ceres CDNA ID no. 40041501
  misc_feature: Homolog of GI Number: 34907966 NR Desc: P0446G04.14
  misc_feature: Homolog of GI Number: 34898234 NR Desc: leaf senescence related protein
  misc_feature: Homolog of GI Number: 34912638 NR Desc: P0410E01.23
  misc_feature: Homolog of GI Number: 54290286 NR Desc: leaf senescence related protein
  misc_feature: Homolog of GI Number: 51091192 NR Desc: lustrin A
  misc_feature: Homolog of GI Number: 52077362 NR Desc: lustrin A
  misc_feature: Homolog of GI Number: 50926336 NR Desc: OSJNBb0002J11.24
  misc_feature: Homolog of GI Number: 50939731 NR Desc: leaf senescence related protein
MRSTMKAQHANGRGSRSPFLTSYALTLAFITFVSVLYFKDFSSTLHRPFLHRPRRHAAPDKSQAGRRAAAERLPFAVGAAPAGCDVGRGEWVYDDAARPWYQEEECPYIQPQLTCQAHGRPDRAYQHWRWQPRGCSLPSFNATLMLEMLRGKRMLFVGDSLNRGQYVSLVCLLHRIIPESSKSMETVDSLTVFKAKDYNATIEFYWAPFLAESNSDDAVVHRIADRIVRGTSIEKHAKFWKGADILVFNTYLWWMTGQKMKILRNSFEDKSKDIIEMETEEAYEMVLNAVLKWVESNMNPRTSRTFFVTMSPTHTRSRDWGDDTDGNCYNQTAPIEDLSYWGSDTSKGLMRVIGEVFSASKSRIPVWVVNITQLSEYRKDAHTQIYKKQWNPLTPEQVADPKSYADCTHWCLPGLQDTWNELLYSKLFFP

SEQ ID NO: 10213 - DNA, 644 bp, Glycine max
  misc_feature: Ceres CLONE ID no. 1610745
  misc_feature: Ceres CDNA ID no. 29191608
  CDS (72)..(443): REFERENCED BY SEQ ID NO: 10214
ttatttaactctagggtttacagagaagctaagaggcgcagccgtagcaaaagctcgtggaattgctagcaatggcgaggatcaaggtttacgagctgaggcagaagacgaaggctgatctgctgaatcaactgaaggacctgaaggcggagcttgccttgcttcgtgttgctaaggtcaccggtggtgcccctaacaagctttccaagataaaggtggtgaggttgaacattgcccaggttttgacggtgatttctcagaagcagaaggctgcgttgagggatgcctacaagaataagaagtacttgcctctcgatctccgccctaagaagaccagggctattcgcaggaggcttactaagcaccaggcatcattgaagacagagagggagaagaagaaagagttatatttcccactaaggaaatatgctatcaaggtgtaactttagagcaatcttatcggttaattggacatttacctcctttatactcgacaagttttgatatatctcattttgtagtttcatgtttattgcttattggctgtgttaaacttcatgtcttctttagacctggggtttcttgaagctaccaggatttatgggtatcgttagtttccgtttaagaaaaaaaaaaaaaaaaaa

SEQ ID NO: 10214 - protein, 123 aa, Glycine max; identical to SEQ ID NO: 3144
  misc_feature: Ceres CLONE ID no. 1610745
  misc_feature: Ceres CDNA ID no. 29191608
  misc_feature (6)..(64): Pfam Name: Ribosomal_L29 PFAM Desc: Ribosomal L29 protein
  misc_feature: Homolog of GI Number: 6984224 NR Desc: 60S ribosomal protein L35
  misc_feature: Homolog of GI Number: 71535092 NR Desc: putative 60S ribosomal protein L35
  misc_feature: Homolog of GI Number: 62751093 NR Desc: similar to 60S ribosomal protein L35
  misc_feature: Homolog of GI Number: 21592412 NR Desc: putative 60S ribosomal protein L35
  misc_feature: Homolog of GI Number: 17104643 NR Desc: putative 60S ribosomal protein L35
  misc_feature: Homolog of GI Number: 33589770 NR Desc: At5g02610
  misc_feature: Homolog of GI Number: 30102548 NR Desc: At3g55170
  misc_feature: Homolog of GI Number: 50923665 NR Desc: OSJNBb0006N15.8
  misc_feature: Homolog of GI Number: 51979244 NR Desc: PREDICTED OJ1126_B06.24 gene product
  misc_feature: Useful for sterility

SEQ ID NO: 10215 - DNA, 746 bp, Glycine max
  misc_feature: Ceres CLONE ID no. 1610807
  misc_feature: Ceres CDNA ID no. 25447020
  CDS (48)..(335): REFERENCED BY SEQ ID NO: 10216
aactacgcaaaaccctacgccgatcccgaacgattccgatccagaaaatggcatccgccgccgccagatctatattccgatcatgctccgcccccaggtcagcgtttcgcgtcgcatcggaagccaaaccggttcgttctccgttccgcatcgcgtccaataagcctctctcgcagtcccaatccactctcaggttccctgtggaattgagttcgtgtgtggaatcgatgatgccgtaccacacggccactgcttctgcgctcatgaattctatgctttcaatttcgacccgcacgagcgcttggattcccgaagattgcaatgatgatgtttgataaggtcgagaagattgaagcaaacttttacataatatctgcaatgtatgaaagtgtctgctgaaaaaattaggagagttgactcggccattgtaaggacaagttgatttctgaaatggagctttaaaacctagaccacctgtacttcattttctttctatttcagatgcattagaggattgcaattttatcctcatgaactttagtgccaaaggcaattaagttggaaatgtactacaaagtaccaataaagtttcattttgtttttccatgtttattagaattttcatattgaatagtctagggatgctttatggatgttagattggagtatgtaatgaaatttctgtaattcctatacaatgatgcctcttaagtttgaatctcaaaccaaaaaaaaaaaaaaaaaaa

SEQ ID NO: 10216 - protein, 95 aa, Glycine max
  misc_feature: Ceres CLONE ID no. 1610807
  misc_feature: Ceres CDNA ID no. 25447020
  misc_feature: Homolog of GI Number: 34904474 NR Desc: OSJNBa0086P08.16
MASAAARSIFRSCSAPRSAFRVASEAKPVRSPFRIASNKPLSQSQSTLRFPVELSSCVESMMPYHTATASALMNSMLSISTRTSAWIPEDCNDDV

SEQ ID NO: 10217 - DNA, 873 bp, Glycine max
  misc_feature: Ceres CLONE ID no. 1611232
  misc_feature: Ceres CDNA ID no. 25446210
  CDS (148)..(711): REFERENCED BY SEQ ID NO: 10218
atgtttgcgaggtcaggatttgtcttgcgaggctgaagctgagtaatacagggtgcgatttgtttccattttccagtcaatcctatactccttaggctattgtaatcttctgctaataaggaggaattattattgggttctgaaaacatgttgaaacaagcaattggcagaatcttcagaaccggtgtttatgcttgtgaaggaaatagagttttgccttggatttatgtgccttcgagctttttccaccatggacaagcgcacatggcacctagaagcttttttggggtagaggatttccttgatgatgacaatagccgaccttacacataccaaaaagggaagaagtcaaagaatccaaataagcacatatcattcaaacaaagaacaattgcctacatggaaccttttacacttgatgtgtttatctcaaagcgctttgtatcggcttcactcactcatagggtaacaagcaaacaggttgcagttgccgggaccaactccaaggacataaaagctgttcttaggtctcgttcagacataccagcatgcatagcaattggtaggattttagctgaaagagcaaaagaagctgatgtttacactggttcttatactccaagggacagggacaagtttgaagggaaaatcagagctgtagttcaatcacttattgacaatgggattgatatcaaggtttatcttgattgagtttagtcactcaagtttgtgggactatcagttaaggtgttgatattttggttgaagcagtaggccccttgtgtgtttgaacatgtccatttagtttggttttgatgataatgggaatatcattattcgaattacagatttggcaaaaaaaaaaaaaaaaaa

SEQ ID NO: 10218 - protein, 187 aa, Glycine max; identical to SEQ ID NO: 1668
  misc_feature: Ceres CLONE ID no. 1611232
  misc_feature: Ceres CDNA ID no. 25446210
  misc_feature (65)..(182): Pfam Name: Ribosomal_L18p PFAM Desc: Ribosomal L18p/L5e family

SEQ ID NO: 10219 - DNA, 613 bp, Glycine max
  misc_feature: Ceres CLONE ID no. 1611890
  misc_feature: Ceres CDNA ID no. 29191647
  CDS (50)..(436): REFERENCED BY SEQ ID NO: 10220
agttctctggaagaggagtgaagcagcagagggaggagcggcattaaaaatgcagatcttcgtgaaaaccctaacggggaagaccataaccctcgaggtcgaaagcagcgacaccattgacaatgtcaaggctaagattcaagacaaggaaggcatccctccggatcagcagcgtttgattttcgccggaaagcaacttgaagatggaaggaccttggccgattacaacatccagaaggaatcaacccttcaccttgtcctcaggcttcgtggtggcatcatcgagccttccctcatggctttggctcgcaaatacaaccaggacaagatgatttgccgcaaatgctatgctcgtctgcaccctagggctgtgaactgccgtaagaagaagtgcggtcatagtaaccagttgaggcctaagaagaagatcaagtaaattctgggtgggatattgttggtctctactttcgttttgtttgtcttagaacagtgacttgtttggtatttatcgtttctggttttgattaatgttaattgttttgagacaatagttttgaactagtcaattatatttttatgatgccattttggtctcaaaaaaaaaaaaaaaaaa

SEQ ID NO: 10220 - protein, 128 aa, Glycine max; identical to SEQ ID NO: 3956
  misc_feature: Ceres CLONE ID no. 1611890
  misc_feature: Ceres CDNA ID no. 29191647
  misc_feature (1)..(74): Pfam Name: ubiquitin PFAM Desc: Ubiquitin family
  misc_feature (77)..(128): Pfam Name: Ribosomal_L40e PFAM Desc: Ribosomal L40e family
  misc_feature: Homolog of GI Number: 71040673 NR Desc: ubiquitin fusion protein
  misc_feature: Homolog of GI Number: 322750 NR Desc: ubiquitin / ribosomal protein CEP52
  misc_feature: Homolog of GI Number: 16323384 NR Desc: putative ubiquitin extension protein UBQ1
  misc_feature: Homolog of GI Number: 52077170 NR Desc: ubiquitin / ribosomal protein CEP52
  misc_feature: Homolog of GI Number: 395079 NR Desc: ubiquitin/ribosomal protein
  misc_feature: Homolog of GI Number: 76559884 NR Desc: TPA: ubiquitin
  misc_feature: Homolog of GI Number: 50920549 NR Desc: Putative ubiquitin / ribosomal protein CEP52
  misc_feature: Homolog of GI Number: 73954303 NR Desc:  similar to ubiquitin A
  misc_feature: Homolog of GI Number: 57101310 NR Desc:  similar to ubiquitin A
  misc_feature: Homolog of GI Number: 73986078 NR Desc:  similar to ubiquitin A

SEQ ID NO: 10221 - DNA, 587 bp, Zea mays
  misc_feature: Ceres CLONE ID no. 1612134
  misc_feature: Ceres CDNA ID no. 36706985
  CDS (39)..(527): REFERENCED BY SEQ ID NO: 10222
aaagaaccactttcacctgaactcctgaagcaaaagcaatggccatgagagcgcttccgctgaccccttccaggagctcctcgtttggagctcaccaaaccaggccgagcggcggcggccccagatcagtgagagcttatgcgaagggagacgaggagggcgacaagcagtccctcttcggaagcatcaccgaggcgctggacttctcgcaggtccggtcggagaaggacgccgagctgctgtacgaggccagggagtccaccagaggtggagggaggatgacgagggagcagtacggagcacttaggcggaagattggtggcacctaccaggatttcttcaagtcatatgttgaagtcgacgggcaatacgtggaggagggttgggtcgacaagacctgcaagatctgcaagaaggacacaaggggggagccgaggcaggttgacaagctaggaagatacgctcacgttgcgtgcctggagaaccccaaaccgacgaactttttcgccaaaatcttcgccagatgaactatgctgcgtccgtcgaaagcgttgtctcgctcgctcgtggttaaaaaaaaaaaaaaa

SEQ ID NO: 10222 - protein, 162 aa, Zea mays
  misc_feature: Ceres CLONE ID no. 1612134
  misc_feature: Ceres CDNA ID no. 36706985
  misc_feature: Homolog of GI Number: 34907850 NR Desc: P0031D02.12
MAMRALPLTPSRSSSFGAHQTRPSGGGPRSVRAYAKGDEEGDKQSLFGSITEALDFSQVRSEKDAELLYEARESTRGGGRMTREQYGALRRKIGGTYQDFFKSYVEVDGQYVEEGWVDKTCKICKKDTRGEPRQVDKLGRYAHVACLENPKPTNFFAKIFAR

SEQ ID NO: 10223 - DNA, 2330 bp, Zea mays
  misc_feature: Ceres CLONE ID no. 1612849
  misc_feature: Ceres CDNA ID no. 40041502
  CDS (82)..(1938): REFERENCED BY SEQ ID NO: 10224
aacccatcgcacacccctgctcacgaaaccgtaggcatcgccgcctccccatacctacgaaactagcatcccgcggcggcgatggccaccggcgacaacgacaagcccccgtcgcttgacgcagacgtcgacatggccgacctagcttccctcgacgccacggccgctacatccgccgccgcgggcggcgcgccttccacccgcttccgtcccaaggccaaggggaagcccaggccgaaggctgagcctcccagacccgtaccagttgccgtacccaagcccttcgaagacgacacccagctgtacattatgcagtaccccctgaggccatgttggcgcccatatgagttacatgagatatgtgaagaggttcgtgtgaagccattgagttcagaagttgaagttgatttgagtatcaatacacagagtgaaaattatgaccaagaggcacctttgaggctgacaaaacagacactatcgtcatccaaggcagttgatgttactaattacgcggttggagttcttaatggcaacttggtccatttgaatcatattgatgcagtggtgcaaatgcgaccatcaatgtcacatattatttctggccgagcacatactaggcaggcttcacaaccccgggaaatgaatgggggagctagtacctcgatggattcatctcataagggaaatgagcgccctgaagattccaaggaccgagcagaagattctgagccatggatttctctcatctaccaaccagcaggaagcaatactgcaactaagtaccatgataagatgatagcaaatgagggtgtgcctattgatttcacaatgagctcctcttgttatttgacgtccttgtgtcctggggcctctactagcagaaagcgtatcaacaaattccaagcaataagggagatgcttttgctaccactggaagaacgcctcaagaaatggtttactgaggtttcaggagtaaatcgatttgatgctctgaaggaccttgctccaacctgttcagaggttgaaattttgaaaatgcttccagagtgtgcatatttggtgcgtggattgtgggtctgcaaaagttctttgttgtttgatggtgtatattctggtcccatggatagaattcttcttgagtttacaaaaagggatcccgtcccatcaaatattctggaaccatttatcaatctgattggcaatcgtgctatgagagactggatactgtctccattgtgtaaaagacgtcaaattctgaaggaccataaatttatatcggcagatttgtctttcataaaacgctatccgcatatagtcaatgaacaagagtgtgcttggtctgctcgggagaccactctccgtgagtccctagaaatgagcactactttggcaaagaagaccatgaattcaaccagacctaatgttgcttctaaagggcctcattcaaatatgagcaagggcagggatggcccatctcaaggaagtgatgaccttgcgcgatctgttttgggcactgttttcactgccaataaagttcgcagcatgcaggcagttgttagagacttgcgccagttggctgcaaaatatgcttccaatagaaaggatggatccaaactgcaagctctgtgcaatgctgcaaaaaattgtgcatcgctgcctcatgatgagctgaatcgaaaaatacatctagttgctgttcctgttcatagtgtttttgttgcaaagcatgaggataagcgagctctacgaaacatatttattttgctcttccgtcacaaagaacccaatggaacattgactaagcaggaagttgttgctgctgctgcgaaacatataaaaagagagattactgacagagagtaccatcaggttgtgacggagatctgcatttctacagaagatgggcacttgctgttgaaaaatggtgatgagccctgagttcgctatgatatgccctgtgaaggtccaccaaggtggaatcgtctctgatgcgtagaatagggtcattcggagtttgggatttggccggtgagaatgagtattgatcaggcagttcaagatagctacagcaaactgttctaggtggctttgtcagccatttttggctcagcagtttttgctgggtgctattgagcggtgtttttcggttagtcgtctttatttgtgtccattgaatccttgctggtctagcttggcgtaattcagttagggatgttattttgtcttttaagtgctgatattgtctgccttaagtaaagtaaagtggaaaccatgaaccaaaaaaaaaaaaaaaaaaaaaaaaaaaaaaaaagtaaaaaaaaaaaaaaaaa

SEQ ID NO: 10224 - protein, 618 aa, Zea mays
  misc_feature: Ceres CLONE ID no. 1612849
  misc_feature: Ceres CDNA ID no. 40041502
  misc_feature (72)..(170): Pfam Name: Sin_N PFAM Desc: Sin
  misc_feature: Homolog of GI Number: 60473681 NR Desc: putative RNA polymerase III subunit
  misc_feature: Homolog of GI Number: 9858778 NR Desc: BAC19.10
MATGDNDKPPSLDADVDMADLASLDATAATSAAAGGAPSTRFRPKAKGKPRPKAEPPRPVPVAVPKPFEDDTQLYIMQYPLRPCWRPYELHEICEEVRVKPLSSEVEVDLSINTQSENYDQEAPLRLTKQTLSSSKAVDVTNYAVGVLNGNLVHLNHIDAVVQMRPSMSHIISGRAHTRQASQPREMNGGASTSMDSSHKGNERPEDSKDRAEDSEPWISLIYQPAGSNTATKYHDKMIANEGVPIDFTMSSSCYLTSLCPGASTSRKRINKFQAIREMLLLPLEERLKKWFTEVSGVNRFDALKDLAPTCSEVEILKMLPECAYLVRGLWVCKSSLLFDGVYSGPMDRILLEFTKRDPVPSNILEPFINLIGNRAMRDWILSPLCKRRQILKDHKFISADLSFIKRYPHIVNEQECAWSARETTLRESLEMSTTLAKKTMNSTRPNVASKGPHSNMSKGRDGPSQGSDDLARSVLGTVFTANKVRSMQAVVRDLRQLAAKYASNRKDGSKLQALCNAAKNCASLPHDELNRKIHLVAVPVHSVFVAKHEDKRALRNIFILLFRHKEPNGTLTKQEVVAAAAKHIKREITDREYHQVVTEICISTEDGHLLLKNGDEP

SEQ ID NO: 10225 - DNA, 1909 bp, Zea mays
  misc_feature: Ceres CLONE ID no. 1612894
  misc_feature: Ceres CDNA ID no. 40041503
  CDS (56)..(1549): REFERENCED BY SEQ ID NO: 10226
aaaaagccacagcgcctcgttgcctccccactttccttttcttcccctactccccatggcggcccgcgaggcctccgccccggctccggcttcgccccacgcaggcgacgggccgggccgcccgccgcggcccacgctcgccctgcccccgcgctccgccgtcgagtccctcttcgccaccggcgcctcctcctcggccggcgccgccgagaccagccccggcccgctcaccctcgccgccgcgctcttccccgacgcgtcctccccggccttccacggctccttcacccagctcctcgtcggcgccataggctccccggccgtaccctcgccgccctctccgttcgccgtcccgccggggctcagcccggccacgctcttcggctcaccgggcctattctctcccacggggagttttgagatgtcccatcaacaagccttagcacaagtaacagcacaagcagttcattctcagtacaatatgataaatcacacagattacagtattcctttttcgtcgacaacagcaccagctttgatcacagcacagcatgccaattcttctgccaatgtggcatcagcacaggagaaaccagctctgccgtcacatgcaggtaatagcaacattgaatcaaatgaggtttcacaaggactcaaaacttctgcacccacttttgataaacctgctgacgatggatacaactggcggaagtatggccagaaggcagttaagggtggcgagtatccaaggagttactacaaatgtacccacacgagttgtccagttaagaaaaaagtggagcgctcagcagaaggacacatcactcaaataatttatagaggtcagcacaaccaccagcgtccaccaaaaaggaggtccaaagatggtggtggtccactaaatgaagcagatgttcttcatgagaatgaagacatttcaactagatcagaacctggctctcaagaacactctggaaaacatgaagggtcaaatgatggcatattagggccttctgtgtcaagaaggggaggaggagatgagcaattgtcaggctcaagtgatagtgatgaggaacaagatgatgaacaaagggctggcgacgaagaccctggctatgcaaatgcaaacaaaagacatgtgccaactccagctcaaaggataattgtgcaaacaaacagcgaagttgatcttctggatgatggctatcggtggcgcaagtatggacagaaagtggtaaaagggaatccctacccgaggagctactatagatgcacgtaccaaggatgcgatgtgaagaagcatatcgaaagatcatcccaagacccaaaggccgtcataacgacttacgaagggaagcacagccatgatgttccagcagtcaggaacggtagccatgctgctgccaacgccaatgggtcatcttccaccagcttaccagtaccacacagggtccacagttcagcatccagtagtcgcagagcggcagaattacaaagcgcatcctcagcttcttctatgctactaaaagaggaaaacgaaataacataggagttttggagtgtgtagccagggtaaattatatctgttctctgatccatttcctcctaggtgtgctgcttcacgctctgcgccgcagcaaaaattgggcactgcaagcccccaccattggttttagtcaagagcgagctctttcgtttgtgcccttccaaaagctgcacaccctgtttggctgcgcggtgtatgttatgttgtcattaccatttacgcccattggttgtaaatgccatcagtcgttcccccggagaactatatggatgacagcattcatcggcccaagtgtatatactcgatttaaaaaccttttttttaactgagatatggtttgttgtagaaaaaaaaaaaaaaaaa

SEQ ID NO: 10226 - protein, 497 aa, Zea mays
  misc_feature: Ceres CLONE ID no. 1612894
  misc_feature: Ceres CDNA ID no. 40041503
  misc_feature (211)..(269): Pfam Name: WRKY PFAM Desc: WRKY DNA
  misc_feature: Homolog of GI Number: 6689916 NR Desc: zinc finger transcription factor WRKY1
  misc_feature: Homolog of GI Number: 50897340 NR Desc: WRKY transcription factor
  misc_feature: Homolog of GI Number: 31790178 NR Desc: WRKY transcription factor
  misc_feature: Homolog of GI Number: 48686707 NR Desc: DNA binding protein WRKY2
  misc_feature: Homolog of GI Number: 33519182 NR Desc: WRKY6
  misc_feature: Homolog of GI Number: 4322940 NR Desc: DNA
  misc_feature: Homolog of GI Number: 77555894 NR Desc: zinc finger transcription factor WRKY1
  misc_feature: Homolog of GI Number: 927025 NR Desc: SPF1
  misc_feature: Homolog of GI Number: 27363252 NR Desc: At1g13960/F7A19_5
  misc_feature: Homolog of GI Number: 4335764 NR Desc: putative WRKY DNA
MAAREASAPAPASPHAGDGPGRPPRPTLALPPRSAVESLFATGASSSAGAAETSPGPLTLAAALFPDASSPAFHGSFTQLLVGAIGSPAVPSPPSPFAVPPGLSPATLFGSPGLFSPTGSFEMSHQQALAQVTAQAVHSQYNMINHTDYSIPFSSTTAPALITAQHANSSANVASAQEKPALPSHAGNSNIESNEVSQGLKTSAPTFDKPADDGYNWRKYGQKAVKGGEYPRSYYKCTHTSCPVKKKVERSAEGHITQIIYRGQHNHQRPPKRRSKDGGGPLNEADVLHENEDISTRSEPGSQEHSGKHEGSNDGILGPSVSRRGGGDEQLSGSSDSDEEQDDEQRAGDEDPGYANANKRHVPTPAQRIIVQTNSEVDLLDDGYRWRKYGQKVVKGNPYPRSYYRCTYQGCDVKKHIERSSQDPKAVITTYEGKHSHDVPAVRNGSHAAANANGSSSTSLPVPHRVHSSASSSRRAAELQSASSASSMLLKEENEIT

SEQ ID NO: 10227 - DNA, 2106 bp, Zea mays
  misc_feature: Ceres CLONE ID no. 1613244
  misc_feature: Ceres CDNA ID no. 40352061
  CDS (231)..(1829): REFERENCED BY SEQ ID NO: 10228
aaagctggcctcctccgcctttctttccttcctccctcggggctccgcgcgcgcagcagccaggaacagctccgctgcctgctcccttgcccttggggcttggggaaaaaaaaacttcaagaacagcggcggtcgcctcttctccaatcctgcttcaaggctgcaccgaccggctctatttgagctatatctctgcaggaaagctcagttcagatccattcacttcactcatgggctcatcctcgggccatcagagaagcaaaacgcgcagcaggaacaggaagcccttgggaattcagctcttcgagcgggtccgtggcagtggcagccccatctccttcagatcatgccaggctctcgtgctagtgctcacgttcctatcctacgccagctaccacgccaccaggaaaaccacgagcatcgtcaagagcgtcctcgacccaaagacgaagacgaacctaggcacgtcgtcggcgcattactggccccctagccacctcttctatctccagaacctcaaaggtgcggacagcaacagcacggctctctccagcggcggcggcggctgggctccgttcaacgcggcggaagacggcacggcgttgctgggcgagatcgacctggcgttcctcggcgcgtacgcggccggcatgttcttcgcgggccacctgggcgacagggtggacctgagggtcctcctcgccgtagggatggtggggaccgggctcttcaccgccgccttcggggccgggtactggctcgacgtgcacagcttctactacttcctggccgtgcagatggtggccggcctgttccagtcgtccgggtggccgtcggtggtcgcggtggtcggcaactggttcgggaagagcaagagggggctcatcatgggggtgtggaacgcccacacctccgtggggaacatttccggctcgctggtcgccgctgccatgttgaggtacgggtggtgctggagctttgtggtgcccggtgtcgtcatcgcgctggtcgggctcgccgtgttcctgctcttgcctgttgcgcctgatgtgattggagtccaggaggatctctgtttgaaggacgctccattgcttgaacgacgacgcgcagatgtagaggaaaaggcggttgggtttattgaggcgtggaggatccctggtgttgcccctttcgccctctgccttttcttctgcaagcttgtggcgtatacgttcctgtactggcttcccttctatatcagccacacagctatcggtggagaatacttgtcggactccgcagccggggtactgtcgacgctgttcgacgtgggcggcgtcgtgggcggcatcctcgccggccacatctccgaccacctggacgcccgggcgctgacggccgcgagcttcaccttctcggcgataccggcgctcttcttctaccgcgtctacgggaacgtctcgctggcctggaacatcgccctcatgttcgtcacggggatgctggtgaacggcccctacgcgctgatcacgacggccgtgtccgcggacctcggcacgcacagctcgctcaacggcaactcccgcgcgctggccaccgtcacggcgatcatcgacggcacggggtccatcggcgccgccgtcggcccgctcctcacgggctacatctccgccaggagctggagcgccgtgttcacgatgctgatggcgtccgcgctcgtcgcggggctgctgctgtccaggctcgtggcggcggaggtggtcgccaagatggagtcccggaggacgcccgcccctgctgcgagcgacctgctgcccgtgtcctcctcctccatggacgaaccgtagatcgcttctagctgcgccccggctgtggtctcctggtgacatggaatggtggcgggagagtagatcacctgtgattttaggcctggtgggactgtggcagcaggtgcgcagtgcgcttctgtcccggaactgtgggatcttgctcctgccgtgccgtgcttcaccgcttctggttcgtcatggtatatatgtatatggaatgtcttctggttgccgacgaaaaaaaaaaaaaaagaaaaaaaaaaaaaaaaaaaaaaaataaaaaaaaaaaaaaaaa

SEQ ID NO: 10228 - protein, 532 aa, Zea mays
  misc_feature: Ceres CLONE ID no. 1613244
  misc_feature: Ceres CDNA ID no. 40352061
  misc_feature (44)..(475): Pfam Name: MFS_1 PFAM Desc: Major Facilitator Superfamily
MGSSSGHQRSKTRSRNRKPLGIQLFERVRGSGSPISFRSCQALVLVLTFLSYASYHATRKTTSIVKSVLDPKTKTNLGTSSAHYWPPSHLFYLQNLKGADSNSTALSSGGGGWAPFNAAEDGTALLGEIDLAFLGAYAAGMFFAGHLGDRVDLRVLLAVGMVGTGLFTAAFGAGYWLDVHSFYYFLAVQMVAGLFQSSGWPSVVAVVGNWFGKSKRGLIMGVWNAHTSVGNISGSLVAAAMLRYGWCWSFVVPGVVIALVGLAVFLLLPVAPDVIGVQEDLCLKDAPLLERRRADVEEKAVGFIEAWRIPGVAPFALCLFFCKLVAYTFLYWLPFYISHTAIGGEYLSDSAAGVLSTLFDVGGVVGGILAGHISDHLDARALTAASFTFSAIPALFFYRVYGNVSLAWNIALMFVTGMLVNGPYALITTAVSADLGTHSSLNGNSRALATVTAIIDGTGSIGAAVGPLLTGYISARSWSAVFTMLMASALVAGLLLSRLVAAEVVAKMESRRTPAPAASDLLPVSSSSMDEP

SEQ ID NO: 10229 - DNA, 573 bp, Zea mays
  misc_feature: Ceres CLONE ID no. 1613764
  misc_feature: Ceres CDNA ID no. 25445943
  CDS (57)..(449): REFERENCED BY SEQ ID NO: 10230
aaccctagccgccacacctaacgacccacacgagcaccaagccgaggggaggggcgatggcgagaggtgtggtgtcgacgaagggcggcacggccgcgggcaagaagaaggggtcggtagccttcacgatcgactgcaccaagcccgtggaggacaagatcatggagatcgcctcgctcgagaagttcctgcaggagcgcatcaaggtcgccggcggcaaggccggcaacctcggcgactccgtcaccatctcccgcgagaagaccaaggtcaccgtaacctgcgacgggcccttctccaagaggtatctgaagtacttgaccaagaagtacttgaagaagcacaaggtgcgagattggctccgtgtgattgcagccaacaaggaccacagcgtctatgagctgcggtacttcaacattgctgagaacgagggcgaggaagaagattagactgcattgcacttatatctcagttttgaactcattggatttgatacttgtacccgtgttttttagactcacaataaagccggtttgtgtttgtgcctaaaaaaaaaaaaaaaaaaaaaaaaaa

SEQ ID NO: 10230 - protein, 130 aa, Zea mays
  misc_feature: Ceres CLONE ID no. 1613764
  misc_feature: Ceres CDNA ID no. 25445943
  misc_feature (16)..(130): Pfam Name: Ribosomal_L22e PFAM Desc: Ribosomal L22e protein family
  misc_feature: Homolog of GI Number: 50939919 NR Desc: putative 60S ribosomal protein L22
  misc_feature: Homolog of GI Number: 42733478 NR Desc: BRI1
  misc_feature: Homolog of GI Number: 6714454 NR Desc: putative 60S ribosomal protein  L22
  misc_feature: Homolog of GI Number: 12642842 NR Desc: putative 60S ribosomal protein L22
  misc_feature: Homolog of GI Number: 6056419 NR Desc: 60S ribosomal protein  L22
  misc_feature: Homolog of GI Number: 13592059 NR Desc: ribosomal protein L22
  misc_feature: Homolog of GI Number: 57086899 NR Desc:  similar to ribosomal protein L22
  misc_feature: Homolog of GI Number: 55590474 NR Desc:  similar to ribosomal protein L22
  misc_feature: Homolog of GI Number: 33150766 NR Desc: heparin
  misc_feature: Homolog of GI Number: 6677775 NR Desc: ribosomal protein L22
MARGVVSTKGGTAAGKKKGSVAFTIDCTKPVEDKIMEIASLEKFLQERIKVAGGKAGNLGDSVTISREKTKVTVTCDGPFSKRYLKYLTKKYLKKHKVRDWLRVIAANKDHSVYELRYFNIAENEGEEED

SEQ ID NO: 10231 - DNA, 1010 bp, Zea mays
  misc_feature: Ceres CLONE ID no. 1614049
  misc_feature: Ceres CDNA ID no. 25446754
  CDS (315)..(878): REFERENCED BY SEQ ID NO: 10232
aacggttgagacgagagcagctcagcagcagagcgccagccgccggactcccacacagcacgcacggacgccatcgaggaaccctaacaagagcacgtcacacggggcgacggtttggcgccgcgccaccggcgactggcggctggtgcagcagatggtaaattatttctcagactcagagtgcaagaaagttggttcgtccagtgaagaggaatagaggttatggttttgtgtgagattgattagcatctgccttcaaatcattcccttggtatttattgagcactgcaagcggttgaggacttgaggtaaacatgctgaagtgcatcttgagccagtcatggaagagaggagcacatatgctacatgcaggaaattcagcaccagctgtactaacttgctggagtcaatttcacagtgggcaggtctggagttcttccaggagcttcttcggcgtggaggatttcgtggacgaggacaacagtaggccatacacgtacaagaaggagaagaggtccaagaacccccacaagcacatctcgttcaagcagcgcaccatcgcccacatggagccgttcacgctggacgtgttcatctccaagcgcttcgtctcggcgtccctcacgcaccggtcgacctgcaggcaggtcgcggtcgccgggaccaactccaaggacatcaaggcggcgctcaggtcgaggtccgacgtgccggcctgcctggccgtcgggcggttcctggccgagagggcgaaggaggccgacgtgtacacctgcacgtacacgccgagggaacgggacaagttcgaggggaagatcagggcggttgttcagtcgctgatcgataacgggatcaatgtgaaactttaccttgactgagttcggtgctgtatgagtagtagttctgttggaacttgcgcgtgagtttatctgttgccagggttgcaggttcgaattattttgtgtccttatgttgataaaaaaataatttgctcaaaaaaaaaaaaaaaa

SEQ ID NO: 10232 - protein, 187 aa, Zea mays
  misc_feature: Ceres CLONE ID no. 1614049
  misc_feature: Ceres CDNA ID no. 25446754
  misc_feature (65)..(182): Pfam Name: Ribosomal_L18p PFAM Desc: Ribosomal L18p/L5e family
MLKCILSQSWKRGAHMLHAGNSAPAVLTCWSQFHSGQVWSSSRSFFGVEDFVDEDNSRPYTYKKEKRSKNPHKHISFKQRTIAHMEPFTLDVFISKRFVSASLTHRSTCRQVAVAGTNSKDIKAALRSRSDVPACLAVGRFLAERAKEADVYTCTYTPRERDKFEGKIRAVVQSLIDNGINVKLYLD

SEQ ID NO: 10233 - DNA, 2351 bp, Zea mays
  misc_feature: Ceres CLONE ID no. 1614216
  misc_feature: Ceres CDNA ID no. 40041504
  CDS (528)..(1706): REFERENCED BY SEQ ID NO: 10234
aatcgggtccccttcccctccgtccagctcgccgtctctcgcagagggaagcagggtgcagcagtcaccagtgaccagtcatggctcgctgcgttgccggcagctgccctccagtcaccttcgcgtgttgcccccgccggactggacgaagtgctgttgttcagtgtggcactgcatcgagcacaccagcaatatctggaaccggaccttcatcatctggatcctcggggcttgttcaagattgtactgcccctctggtctgtgcactgcaattaactgccagacaagatgtttcctgctttcacttcccaggacacaacagaggaaaagctgctccatcttccttgtcgaaactcattggctcaggggcatttctgcatgacttgcccgagctacccgagctggatgatctcttctccccaaaaggtgtgattctagatgcccagaggcgagcagctcaactgtttgggtcatctaaaacttggttccttgtcaacggaacgacctgtggaatccaggcctcagtgatggctacctgttctcccggcgactacctcattgtgccacggaactgccacatttcagtgatctctgcgctggtcttgtctggtgtggtgcctaaatacataataccagaatataattctgggtgggacattgctggtggtatcaccccgctgaagctggatgaagcagtaaaagagctggaggaggatggaaagagggtaggcgctgttcttgttacttcacccacctaccatggtgtatgcagcaatgtgcaaggtattgtcagtgtttgtcatccacgaggcattccggttatagttgatgaagcgcatggtgcacatttcaggttccatgacagtttgccaagcactgcaattgagcaaggtgctgacctagctgtgcaatccacacacaaggtcctgtgctcccttacacagtcttcaatgcttcacatgtctggagatcttgtcgatgtagataaagtaagccagtgccttcagctcctccagagctcgagccctagttaccttctactgtcatctttagatgctgcgagagatcagctgagccagaacacaaatatatttgatgagccattagctatagcatcggaaacaaaagacaaactggcgagaatccctgggatatctgttctaggcttaccatgctttgcttctgatttccctgctatcgatccgttgcgcatcacactcagtgcctcagatctgcaattatcaggatacgaagccgatgacattctatatgaaggccatcaaatcgtatctgagcttgttggcacaagggccgtgacatttgcagtcaacttaggaaccagagtgcaggacgctgagaagcttgtgcagtctgcaaagcatctatcagaaaaacatttctttgcaaatagcctgaaacccgtgaaggagaatcgtgtgcatggcccattagagaatatctctgtgcatctgagtccaagagaggccttctttacagagaagaggagagtgaaaatcgaggacagccttggtgaaatctgtggtgagctaatatgcccgtatccacctggtatcccagttctgattccaggcgaggtagtaacccatgattcactgtcctacttgatgagcgttagacaccaaggcatcacgatcagtggagcggctgatgctgagctaaattccattctggtgtgcgacctatgatgattgccctattgtttctcacaagactgtgttgtcgcagagataccgtgggtgggagagatcaagtatggtttatgccaagtcaagagcacaatctattgtccgcttgatggatgtaaaccaatggctggcggtttgtagccgccggccacttggccaaataatttagtccgtgttctgtctcgtctcgtgagccgaaagagttgccaagctgcgacatatgatgccaaagcatgaataagggtctatagcatgtgatctcctgtgttgttgtttgaagtatgagttgctagggagggctggctacctttctatctgaagtggcgtgcaatgtttcctctttgcttctcttctgaactgggaggtccggtctgaactggcagtaaagctgaagcatcatatgcaggtctgcgcacctccacggttgtgctacctccggctgcatgttttgcagggcttctgaaacaagtactctctaccttctcttctaagtttatccatcaactcatgaattcacgaacattccacaactcgtacacacacacacaaaaaggaaacataggaatggaccgcatcattgtaatcacaattttttttccttcatttcgtagaatggcactcttgctccaaaaaaaaaaaaaaaaa

SEQ ID NO: 10234 - protein, 541 aa, Zea mays
  misc_feature: Ceres CLONE ID no. 1614216
  misc_feature: Ceres CDNA ID no. 40041504
  misc_feature (444)..(531): Pfam Name: OKR_DC_1_C PFAM Desc: Orn/Lys/Arg decarboxylase
  misc_feature (57)..(437): Pfam Name: OKR_DC_1 PFAM Desc: Orn/Lys/Arg decarboxylase
  misc_feature: Homolog of GI Number: 51964246 NR Desc: PREDICTED OSJNBb0043P23.3 gene product
  misc_feature: Homolog of GI Number: 28269398 NR Desc: putative decarboxylase
  misc_feature: Homolog of GI Number: 53764623 NR Desc: COG1982: Arginine/lysine/ornithine decarboxylases
  misc_feature: Homolog of GI Number: 17232379 NR Desc: lysine decarboxylase
  misc_feature: Homolog of GI Number: 67924908 NR Desc: Orn/Lys/Arg decarboxylase
  misc_feature: Homolog of GI Number: 23130110 NR Desc: COG1982: Arginine/lysine/ornithine decarboxylases
  misc_feature: Homolog of GI Number: 71677274 NR Desc: Orn/Lys/Arg decarboxylase
  misc_feature: Homolog of GI Number: 16329381 NR Desc: lysine decarboxylase
  misc_feature: Homolog of GI Number: 81299518 NR Desc: lysine decarboxylase
  misc_feature: Homolog of GI Number: 56750832 NR Desc: lysine decarboxylase
MARCVAGSCPPVTFACCPRRTGRSAVVQCGTASSTPAISGTGPSSSGSSGLVQDCTAPLVCALQLTARQDVSCFHFPGHNRGKAAPSSLSKLIGSGAFLHDLPELPELDDLFSPKGVILDAQRRAAQLFGSSKTWFLVNGTTCGIQASVMATCSPGDYLIVPRNCHISVISALVLSGVVPKYIIPEYNSGWDIAGGITPLKLDEAVKELEEDGKRVGAVLVTSPTYHGVCSNVQGIVSVCHPRGIPVIVDEAHGAHFRFHDSLPSTAIEQGADLAVQSTHKVLCSLTQSSMLHMSGDLVDVDKVSQCLQLLQSSSPSYLLLSSLDAARDQLSQNTNIFDEPLAIASETKDKLARIPGISVLGLPCFASDFPAIDPLRITLSASDLQLSGYEADDILYEGHQIVSELVGTRAVTFAVNLGTRVQDAEKLVQSAKHLSEKHFFANSLKPVKENRVHGPLENISVHLSPREAFFTEKRRVKIEDSLGEICGELICPYPPGIPVLIPGEVVTHDSLSYLMSVRHQGITISGAADAELNSILVCDL

SEQ ID NO: 10235 - DNA, 685 bp, Glycine max
  misc_feature: Ceres CLONE ID no. 1614424
  misc_feature: Ceres CDNA ID no. 29191609
  CDS (71)..(538): REFERENCED BY SEQ ID NO: 10236
aggcaggcatccatcggcagttagagacagagagagagagaaacaaaaccctaattggtgagtggcgaaaatggcgcagccggcggcggcagcagcagcaacaggagcagcagtaatcgagcaagtgcagtgcttcgggcggaagaagacagcggtggcagtgacctactgcaagcgtggtcgaggcctcatcaagatcaatggctgcccgatcgagctggtggagccggagatcctccgtttcaaggccttcgagccaatcctcctcctcggccgccaccgcttcgccggcgtggacatgcgcatcagagtcaagggcggcggtcacacctcccagatctacgccatcaggcagagcatagccaaggccctcgttgcttactaccagaagtacgtagacgagcagtccaagaaggagatcaaggacatcctcgtcaggtacgaccgcaccctcctcgtcgccgatccccgccgctgcgagcccaagaagttcggcggtcgcggtgctcgcgccaggttccagaagtcctaccgttgatttccccccttttttcatgttattcttcataacttgttaaagtactttctccctgtcttatttgttttgcgctgagttaagttcaatcggattttgcatacagctatataattatgctttagttaagtttaaaaaaaaaaaaaaaaa

SEQ ID NO: 10236 - protein, 155 aa, Glycine max
  misc_feature: Ceres CLONE ID no. 1614424
  misc_feature: Ceres CDNA ID no. 29191609
  misc_feature (23)..(155): Pfam Name: Ribosomal_S9 PFAM Desc: Ribosomal protein S9/S16
  misc_feature: Homolog of GI Number: 6984222 NR Desc: 40S ribosomal protein S16
  misc_feature: Homolog of GI Number: 439654 NR Desc: RS16 protein
  misc_feature: Homolog of GI Number: 21555842 NR Desc: 40S ribosomal protein S16
  misc_feature: Homolog of GI Number: 16323500 NR Desc: putative 40S ribosomal protein S16
  misc_feature: Homolog of GI Number: 2641209 NR Desc: ribosomal protein S16
  misc_feature: Homolog of GI Number: 4574242 NR Desc: ribosomal protein S16
  misc_feature: Homolog of GI Number: 6721162 NR Desc: putative 40S ribosomal protein S16
  misc_feature: Homolog of GI Number: 77552917 NR Desc: ribosomal protein S9
  misc_feature: Homolog of GI Number: 7440266 NR Desc: probable ribosomal protein S16
  misc_feature: Homolog of GI Number: 40556671 NR Desc: small subunit ribosomal protein S16
MAQPAAAAAATGAAVIEQVQCFGRKKTAVAVTYCKRGRGLIKINGCPIELVEPEILRFKAFEPILLLGRHRFAGVDMRIRVKGGGHTSQIYAIRQSIAKALVAYYQKYVDEQSKKEIKDILVRYDRTLLVADPRRCEPKKFGGRGARARFQKSYR

SEQ ID NO: 10237 - DNA, 679 bp, Glycine max
  misc_feature: Ceres CLONE ID no. 1614454
  misc_feature: Ceres CDNA ID no. 35383479
  CDS (60)..(491): REFERENCED BY SEQ ID NO: 10238
ttggttgaacttcattgtttttggctaagcctcgaaatccagaaaaatcgtgagcgaagatgatgcacatgaccttttactggagcaggaaggtgaatctcctaatagattcatggaagaccaacgattggacggagtatctcatcactctgctcgcatgcctcgtcgttgccgccttctaccagttcctagagaatcgccgcatccgcctcaagctcatcggcgccggaaatcccttcccggcagagatcgaggccccgcttctgcgacggaagcttgccggaaaccgcgccaaggtgggcgtgaaggtagccggagcgtttctgttcgggctgagctcggcgatcgggtacttgctgatgttgtcggtgatgtccttcaacggtggggtgtttgtggccgtcgtcgtgggtcttgctgttggttacttcttcttcaggaacgagggcgaagattcccttgtcgttgatacttcgtgtgcctgtgcttaaatcttccaatttcctgtaataataataatataataggagtagtagtgcttgttaattatttttccgttcatttctagtattttccgtttttaatttagcaaacttgtttcaaggaatttgggatttgtgatttcgtatatgaaattgtaattaactgtaattgtaatcaaaaaaaaaaaaaaaaaaaa

SEQ ID NO: 10238 - protein, 143 aa, Glycine max
  misc_feature: Ceres CLONE ID no. 1614454
  misc_feature: Ceres CDNA ID no. 35383479
  misc_feature (88)..(133): Pfam Name: Ctr PFAM Desc: Ctr copper transporter family
  misc_feature: Homolog of GI Number: 51091411 NR Desc: putative COPT5
  misc_feature: Homolog of GI Number: 21592530 NR Desc: COPT5
  misc_feature: Homolog of GI Number: 18496860 NR Desc: COPT5
  misc_feature: Homolog of GI Number: 50946453 NR Desc: COPT5
  misc_feature: Homolog of GI Number: 50924123 NR Desc: OJ991214_12.9
  misc_feature: Homolog of GI Number: 66362234 NR Desc: possible copper transporter
  misc_feature: Homolog of GI Number: 72010227 NR Desc:  similar to solute carrier family 31
MMHMTFYWSRKVNLLIDSWKTNDWTEYLITLLACLVVAAFYQFLENRRIRLKLIGAGNPFPAEIEAPLLRRKLAGNRAKVGVKVAGAFLFGLSSAIGYLLMLSVMSFNGGVFVAVVVGLAVGYFFFRNEGEDSLVVDTSCACA

SEQ ID NO: 10239 - DNA, 741 bp, Glycine max
  misc_feature: Ceres CLONE ID no. 1614532
  misc_feature: Ceres CDNA ID no. 25446211
  CDS (63)..(620): REFERENCED BY SEQ ID NO: 10240
ctgcggcacttgggaggaggcactgtggcagaagtcctaggagtgtaaaacagagacgcaaaatgaagacgatcttgtcgtctgagaccatgaatattcccgacggcgtgagcatcaaggttcacgctaaggttatcgaggttgagggccctcgtggaaaactcgtgcgagacttccaccatctgaacttggacttccaacttattaccgacgatggcggtaaaaggaagctcaagattgattcttggtttggttctcgtaaaacctccgccgccatccgcaccgccctcagccacgttgagaatttgatcaccggcgtcaccaagggataccgatacaaaatgagattcgtgtacgcacattttccgatcaacgctagcattggcaacaacagcaagtccatcgagatcagaaatttcctcggcgagaagaaggtgaggaaagtggacatgcttgagggcgtgtcggttgttagatctgaaaaggtcaaagatgaattggtcttggatggaaacgacattgaacttgtttctaggtcatgtgctctcattaaccagaaatgtcatgttaagaacaaggatatccggaagtttcttgatggtatttatgtcagcaagtagagaagagaaagagaagtagagatgaataaaatctaattgccgccgtttgtatctgtatctgtgttgtaatttaatttaatcttaggtgcacattattgattgtaaaaaaaaaaaaaaaaaa

SEQ ID NO: 10240 - protein, 185 aa, Glycine max
  misc_feature: Ceres CLONE ID no. 1614532
  misc_feature: Ceres CDNA ID no. 25446211
  misc_feature (12)..(89): Pfam Name: Ribosomal_L6 PFAM Desc: Ribosomal protein L6
  misc_feature: Homolog of GI Number: 20727 NR Desc: GA
  misc_feature: Homolog of GI Number: 6015604 NR Desc: ribosomal protein L9
  misc_feature: Homolog of GI Number: 12642868 NR Desc: putative ribosomal protein L9
  misc_feature: Homolog of GI Number: 21554945 NR Desc: ribosomal protein L9
  misc_feature: Homolog of GI Number: 21436441 NR Desc: putative ribosomal protein L9
  misc_feature: Homolog of GI Number: 33087067 NR Desc: ribosomal L9
  misc_feature: Homolog of GI Number: 7440702 NR Desc: probable ribosomal protein L9
  misc_feature: Homolog of GI Number: 51963784 NR Desc: PREDICTED OJ1435_F07.31 gene product
MKTILSSETMNIPDGVSIKVHAKVIEVEGPRGKLVRDFHHLNLDFQLITDDGGKRKLKIDSWFGSRKTSAAIRTALSHVENLITGVTKGYRYKMRFVYAHFPINASIGNNSKSIEIRNFLGEKKVRKVDMLEGVSVVRSEKVKDELVLDGNDIELVSRSCALINQKCHVKNKDIRKFLDGIYVSK

SEQ ID NO: 10241 - DNA, 746 bp, Glycine max
  misc_feature: Ceres CLONE ID no. 1614560
  misc_feature: Ceres CDNA ID no. 36707149
  CDS (62)..(574): REFERENCED BY SEQ ID NO: 10242
gtgctaatcttatcttatccctctaatcactctagctgttgcaaatttctactatttttcaatggcttctgcagatgttgagttccgttgctttgttggtgggcttgcttgggtcaccggcaacgatgccctcgagaaagccttttcaatctacggcgacatcgttgaatcgaaggttatcaacgaccgtgagactggaaggtccagaggattcggatttgtgaccttcgcctcagagcagtcaatgaaagatgcgatcgcaggaatgaacggccaggaccttgacggccgtaacatcactgtcaacgaagctcagacccgcgccagccgtggtggtggtggaggcggtggtttcggaagtggtggtggatacaaccgcggtagcggtggatatggtggtggtggtggcggcggcggatacggtggtcgtcgtgaaggtggatacaaccgtaatggtgggggtggaggtggaggatacggcggtggtagagaccgtggttacggtggtgatggtggttctcgctactctcgcggtggggaaggcggtggatccgatggaaactggagaaattaggcatatgaccctgtaaattagggtttatgattaagttcaattattttaaggtgttgtctgtgtgtggtttaagtttcggtatctgtgttggtttcgtttcgtgttcctgtggttttcgtttttgacctacaattctagttgtgtttatagtcaaaaaaaaaaaaaaaaaaaa

SEQ ID NO: 10242 - protein, 170 aa, Glycine max; identical to SEQ ID NO: 1994
  misc_feature: Ceres CLONE ID no. 1614560
  misc_feature: Ceres CDNA ID no. 36707149
  misc_feature: The plant flowers significantly late compared to wild-type.
  misc_feature: null
  misc_feature: Useful for making plants with altered Lignin content
  misc_feature: Useful for making plants with modulated flowering time
  misc_feature: Useful for making plants with modulated nitrogen use efficiency
  misc_feature (10)..(81): Pfam Name: RRM_1 PFAM Desc: RNA recognition motif.
  misc_feature: Homolog of GI Number: 5726567 NR Desc: glycine
  misc_feature: Homolog of GI Number: 18076086 NR Desc: glycine
  misc_feature: Homolog of GI Number: 2331133 NR Desc: glycine
  misc_feature: Homolog of GI Number: 34851124 NR Desc: putative glycine
  misc_feature: Homolog of GI Number: 2267593 NR Desc: glycine
  misc_feature: Homolog of GI Number: 2674201 NR Desc: glycine
  misc_feature: Homolog of GI Number: 7439982 NR Desc: RNA
  misc_feature: Homolog of GI Number: 50881454 NR Desc: glycine
  misc_feature: Homolog of GI Number: 2119043 NR Desc: glycine
  misc_feature: Homolog of GI Number: 77557139 NR Desc: glycine

SEQ ID NO: 10243 - DNA, 938 bp, Glycine max
  misc_feature: Ceres CLONE ID no. 1614593
  misc_feature: Ceres CDNA ID no. 25402341
  CDS (99)..(581): REFERENCED BY SEQ ID NO: 10244
attctccgttaagattctttcttctttcctctttccactcttggtcttatcttcttcacaatcccacaaccactccttgttataaatcagatccaaacatggccgaagaacaccgatgccaagctcccgaaggtcacagactctgctccaacaactgcggcttcttcggtagccccgccacaatgaatctctgttccaaatgctacagagacatccgtttgaaggaagaagaacaagccaaaactaaatccacaatcgaaaccgctctttctggatcttcctccgccaccgtcgccgttgcctccgccgtggattctcttccggcgccggttgaatccctccctcaaccgtcggtggtgagttcgccagatgtggccgcaccggttcaggcgaaccggtgcggcgcgtgtaggaagcgcgtgggattgactgggtttaagtgcaggtgcggaaccacgttttgtgggactcaccggtaccccgagaaacacgcgtgtggcttcgatttcaaggcggtggggagagaggagatagcacgggcgaatcccgtgatcaaaggcgagaagctacggaggatttaatctgcaccgttgatatgatgatcgaagcgattagggtgagttgatcaggaccgtccgtcgtgggccgttgatacgaacctatttcgagcgtgtgtaagaaaaaaaaaatctattagttatgacgacattgggaagggttgaataagtcatattttggaggctttgctttgtgtttgttcattaaaaatggaaaatgttaggtccacccacgttcggaaattgaggggtttgtttagaattgcaatgcaatgtaaaaaagtgtagtttaatatttttctacaggcatttctatttttcttccgtttgcgagaaaggtaaattatcgtctgcgttgtattcaaaaaaaaaaaaaaaaaa

SEQ ID NO: 10244 - protein, 160 aa, Glycine max; identical to SEQ ID NO: 3176
  misc_feature: Ceres CLONE ID no. 1614593
  misc_feature: Ceres CDNA ID no. 25402341
  misc_feature (101)..(141): Pfam Name: zf PFAM Desc: AN1
  misc_feature (13)..(37): Pfam Name: zf PFAM Desc: A20
  misc_feature: Homolog of GI Number: 7669954 NR Desc: zinc finger
  misc_feature: Homolog of GI Number: 18377546 NR Desc: zinc finger
  misc_feature: Homolog of GI Number: 50909195 NR Desc: putative multiple stress
  misc_feature: Homolog of GI Number: 23198266 NR Desc: putative zinc finger protein
  misc_feature: Homolog of GI Number: 38566602 NR Desc: At1g12440
  misc_feature: Homolog of GI Number: 8778645 NR Desc: F5O11.17
  misc_feature: Homolog of GI Number: 60202503 NR Desc: zinc finger protein
  misc_feature: Homolog of GI Number: 41350259 NR Desc: putative zinc finger protein ZmZf
  misc_feature: Homolog of GI Number: 57899571 NR Desc: zinc finger protein 216
  misc_feature: Homolog of GI Number: 50934425 NR Desc: putative zinc finger protein 216

SEQ ID NO: 10245 - DNA, 1083 bp, Glycine max
  misc_feature: Ceres CLONE ID no. 1614651
  misc_feature: Ceres CDNA ID no. 25402489
  CDS (202)..(807): REFERENCED BY SEQ ID NO: 10246
attcactctctgaatccttcactgactaacccaacaatgcctctgcgccctcactgagatcgtgcccttcatcaatcccaagctgtcccgccgtctcctatatcgcttcaacgtcatgttcctttaacattgttgaagtgcatcttaattccttaactggagctcagccctaatttagaagaatcctacaagatttgggaaatggctgctgcacgagggttggtactgtcacgtcctgttacttttgtaactgccaatgccaaaaagcttgaagaagttcgtgccatcttgggcaattccattccttttcagtccctcaaacttgacttgccagagttgcaaggagaacctgaagatatctccaaagagaaggctcgaattgctgctcttcaggtgaatggacctgtgttggttgaagacacttgcctctgtttcaatgccttgaagggtcttccagggccttacatcaaatggtttctgcagaagcttggtcatgaaggtctcaacaatttgctgatggcatatgatgataaatcagcgtatgccttatgtgtattttcctttgctgctggtccagacagtgaacctatcacattttctggaaaaactccgggaaagattgttcctccaagagggcctaatgattttggatgggatcctatttttgaacctgatggctatgaccaaacgtatgctcagatgcccaaagaagaaaagaacaaaatttcccaccgctccaaatctcttgcattggtgaaatctcattttgctgaagctagatttacttttgacgtcaagaacttctgaaagctgaacgtggtaggttataggctacaagctctttattaaaagtcccttgaaattaaacggaaattgtttctagcagtaacaatgtggaaattactttgaacttaaatactgcttttgtttacaacttctccagcaaaagaacaaaaaccaaacttagaaaaatataccaaagaaaaactaatcttaaagatgttttggtttgaacaaaaattgctacgagactaaaaaatagagcttaatcgatatacattgttggtgtaaaaaaaaaaaaaa

SEQ ID NO: 10246 - protein, 201 aa, Glycine max
  misc_feature: Ceres CLONE ID no. 1614651
  misc_feature: Ceres CDNA ID no. 25402489
  misc_feature (13)..(189): Pfam Name: Ham1p_like PFAM Desc: Ham1 family
  misc_feature: Homolog of GI Number: 21617884 NR Desc: putative HAM1 protein
  misc_feature: Homolog of GI Number: 31432469 NR Desc: putative HAM
  misc_feature: Homolog of GI Number: 58389507 NR Desc: ENSANGP00000019707
  misc_feature: Homolog of GI Number: 19920712 NR Desc: CG8891
  misc_feature: Homolog of GI Number: 31982664 NR Desc: inosine triphosphatase
  misc_feature: Homolog of GI Number: 50751047 NR Desc:  similar to Inosine triphosphate pyrophosphatase
  misc_feature: Homolog of GI Number: 27732417 NR Desc: similar to inosine triphosphatase
  misc_feature: Homolog of GI Number: 73991962 NR Desc:  similar to inosine triphosphatase isoform a
  misc_feature: Homolog of GI Number: 48097861 NR Desc: similar to melanization
  misc_feature: Homolog of GI Number: 57104450 NR Desc:  similar to brain my049 protein
MAAARGLVLSRPVTFVTANAKKLEEVRAILGNSIPFQSLKLDLPELQGEPEDISKEKARIAALQVNGPVLVEDTCLCFNALKGLPGPYIKWFLQKLGHEGLNNLLMAYDDKSAYALCVFSFAAGPDSEPITFSGKTPGKIVPPRGPNDFGWDPIFEPDGYDQTYAQMPKEEKNKISHRSKSLALVKSHFAEARFTFDVKNF

SEQ ID NO: 10247 - DNA, 1114 bp, Glycine max
  misc_feature: Ceres CLONE ID no. 1614653
  misc_feature: Ceres CDNA ID no. 25893181
  CDS (358)..(774): REFERENCED BY SEQ ID NO: 10248
gagctagaagcaatcgtgtctccgcctcaacgtcatccaaacatctttgcccaactcccgccagaatttgaacgaccttgctagccgccgttgctcttcaggattctattatcgccatacggtcgtgcagatccaccacccacccacgtcatcgcaacttctagctaggccccgcgcacaagctagcttcccgcgttctagctcggcagcctgcaaacacacgaccgcatccgagtcctgaacatctgtcgtctatctgtccattcgcaaacaacagcctactggcgatatagctagtctatcttccaccttcttcatacgctatagccgtgctacgcagcacacgactctttcacaatgactggcgaagcatggttgtacctgttggcggtgctgataaacgccgtcaacctgttcctacaagtcttctttactatcatgtacagcgatctggaatgcgactacatcaaccccatcgatctctgtaaccgcctgaacacctacatcatccccgaagccgctgtccacgccttcctgaccttcctgttcctcatcaacggatactggattgcgctgattctgaacctgcctctattggcctggaatggaaagaagatctttgagaaccagcatcttttggacgcgacggagatcttcaggaagctcaacgtgcacaagaaggaatccttcatcaagctgggtttccacctgctcatgttcttcttctacctctacagcatgattgtcgccctcatccgtgacgagtctcactaggtggggatcacgcccttcgtcttgattgtggggatctttgtggctgtactggttgcagtgaacctcgaggcacgaattcaacagcggttagagaacggcggatagatgcacttgatatccggctcagatagacgagccacgcgtacgcatattgctagcgggaggacatgaatagttgttgggttgagataatgtggaatacccgaggcaatgggtttggcggcaggaagcgcatacaggaaaggattgaacgattttatgtcctgatggggtatgatagcgttatgttagctctcgtaaatggaacccagttttcacatgtaaaaaaaaaaaaaaaaaa

SEQ ID NO: 10248 - protein, 138 aa, Glycine max
  misc_feature: Ceres CLONE ID no. 1614653
  misc_feature: Ceres CDNA ID no. 25893181
  misc_feature (4)..(127): Pfam Name: Cornichon PFAM Desc: Cornichon protein
  misc_feature: Homolog of GI Number: 66848255 NR Desc: endosomal cargo receptor
  misc_feature: Homolog of GI Number: 45184974 NR Desc: AAR149Wp
  misc_feature: Homolog of GI Number: 57089085 NR Desc:  similar to Protein HSPC163
  misc_feature: Homolog of GI Number: 34869644 NR Desc: similar to cornichon
  misc_feature: Homolog of GI Number: 55640713 NR Desc:  similar to cornichon
  misc_feature: Homolog of GI Number: 8778623 NR Desc: F5O11.7
  misc_feature: Homolog of GI Number: 34861435 NR Desc: similar to cornichon
MTGEAWLYLLAVLINAVNLFLQVFFTIMYSDLECDYINPIDLCNRLNTYIIPEAAVHAFLTFLFLINGYWIALILNLPLLAWNGKKIFENQHLLDATEIFRKLNVHKKESFIKLGFHLLMFFFYLYSMIVALIRDESH

SEQ ID NO: 10249 - DNA, 844 bp, Glycine max
  misc_feature: Ceres CLONE ID no. 1614671
  misc_feature: Ceres CDNA ID no. 25402490
  CDS (60)..(608): REFERENCED BY SEQ ID NO: 10250
aacacaattacacacgaatttccttagttaggcattgctttaatttgcaagtgtgtgagatgggaaaaatggaacctctacctttgctttcactaaaccacgtttcttttgtatgtaagagtgtgagtgagtctgtgaaattctaccaggatgtccttggatttgtgctcatcaagaggccatcttctttcaaatttgaaggggcttggttattcaattatggcattggcattcacctgctagagtcagaaaaggttccggtggaaaaaagagagatcaacccgaaagaaaatcatatatcgtttcaatgctcagacatgaaagttataatgcagaaactggatgcaatgaagattgagtatgtgagagcagttgtggaagagggtggaattaaagttgatcagctcttctttcatgacccagatggatatatgatagaaatatgcaactgccaaaatctccctgtgcttcccatttcctcatgccctctaaagcagctcgcagcaggggaagctactacattgaacattaactgctttgcagacgaatctgtgtctatgctgatgatggacaatttggtgatggatatgttgaagatttcaatataattaaggctttttatccaacgagaggaaagggagaaataaacggtaacagtaaaaaaaaaaaaacattagaataaatagttatttttatctttaaacgtgtagaatgcttataaatttatttttaaaaatgaaaattcaaattttaatgtacgataaatttatttatccatgaaattatgtccgttatcgttaatgaaaaaacttacgtgacacattcatgatcaaaaaaaaaaaaa

SEQ ID NO: 10250 - protein, 182 aa, Glycine max
  misc_feature: Ceres CLONE ID no. 1614671
  misc_feature: Ceres CDNA ID no. 25402490
  misc_feature (11)..(128): Pfam Name: Glyoxalase PFAM Desc: Glyoxalase/Bleomycin resistance protein/Dioxygenase superfamily
  misc_feature: Homolog of GI Number: 16974407 NR Desc: At2g28420/T1B3.6
  misc_feature: Homolog of GI Number: 50939739 NR Desc: glyoxalase family
  misc_feature: Homolog of GI Number: 50926971 NR Desc: OSJNBa0091D06.24
  misc_feature: Useful for delaying flowering time
  misc_feature: Useful for making ornamental plants with modified leaves
  misc_feature: Useful for making plants with altered leaf shape eg curled leaves
MGKMEPLPLLSLNHVSFVCKSVSESVKFYQDVLGFVLIKRPSSFKFEGAWLFNYGIGIHLLESEKVPVEKREINPKENHISFQCSDMKVIMQKLDAMKIEYVRAVVEEGGIKVDQLFFHDPDGYMIEICNCQNLPVLPISSCPLKQLAAGEATTLNINCFADESVSMLMMDNLVMDMLKISI

SEQ ID NO: 10251 - DNA, 805 bp, Glycine max
  misc_feature: Ceres CLONE ID no. 1614678
  misc_feature: Ceres CDNA ID no. 25893182
  CDS (81)..(626): REFERENCED BY SEQ ID NO: 10252
gctaattatgccctagtttgcttcttcccttagccgttgctctgcttcaacattgcggaagcagaagaagcgccgcagctatggtgaagtactccagagaacccgacaatcccaccaagtcctgcaaggccagaggcgctgacctcagagttcattttaagaacactagggagactgcctttgccatcaggaagttgccccttgttaaagctaaacgatacttagaggatgttttggcccacaaacaggctattcctttccgacgcttttgtggtggtgttgggaggacggcccaggctaagaacagacactccaatgggcaaggacgctggcccgtcaaatcagctaagttcattctagatttgctgaagaatgctgagagtaatgctgaagtgaaaggtttggatgtcgatgctctgtacatttctcatatccaggttaatcaagcacagaagcaaagacgccgcacctacagagctcatggaagaatcaacccttacatgtcatctccatgccacattgagctgatattatctgagaaggaagagccggtgaagaaggaggctgagactcaattggcaacaagcaagaagaagggcgctcttcgaagtggtgcttcatcttaaattacccttgaagctactggatgaccttcattcctgatttatgtcagttttgtctatcgttttcctttatatttgttatgagctgcttttgaagcttggacagcaccttttgcttggtatactatgtttcaagttaattgagttactcgggaatttttactaaaaaaaaaaaaaaaaaa

SEQ ID NO: 10252 - protein, 181 aa, Glycine max
  misc_feature: Ceres CLONE ID no. 1614678
  misc_feature: Ceres CDNA ID no. 25893182
  misc_feature (17)..(153): Pfam Name: Ribosomal_L22 PFAM Desc: Ribosomal protein L22p/L17e
  misc_feature: Homolog of GI Number: 21594923 NR Desc: putative 60S ribosomal protein L17
  misc_feature: Homolog of GI Number: 15824574 NR Desc: ribosomal protein
  misc_feature: Homolog of GI Number: 78191466 NR Desc: ribosomal protein PETRP
  misc_feature: Homolog of GI Number: 50899126 NR Desc: putative ribosomal protein L17
  misc_feature: Homolog of GI Number: 2668748 NR Desc: ribosomal protein L17
  misc_feature: Homolog of GI Number: 40287468 NR Desc: ribosomal protein PETRP
  misc_feature: Homolog of GI Number: 12240036 NR Desc: ribosomal protein L17
  misc_feature: Homolog of GI Number: 421985 NR Desc: ribosomal protein L17.1
  misc_feature: Homolog of GI Number: 19102 NR Desc: ribosomal protein L17
  misc_feature: Homolog of GI Number: 50947889 NR Desc: putative ribosomal protein L17
  misc_feature: Useful for delaying flowering time
  misc_feature: Useful for making stronger plants
  misc_feature: Useful for sterility
MVKYSREPDNPTKSCKARGADLRVHFKNTRETAFAIRKLPLVKAKRYLEDVLAHKQAIPFRRFCGGVGRTAQAKNRHSNGQGRWPVKSAKFILDLLKNAESNAEVKGLDVDALYISHIQVNQAQKQRRRTYRAHGRINPYMSSPCHIELILSEKEEPVKKEAETQLATSKKKGALRSGASS

SEQ ID NO: 10253 - DNA, 653 bp, Glycine max
  misc_feature: Ceres CLONE ID no. 1614680
  misc_feature: Ceres CDNA ID no. 25893183
  CDS (3)..(392): REFERENCED BY SEQ ID NO: 10254
attccacattcgaagaaataaactcacccactaagcactacacaaatcacacagagttgcaagagaaagataaaagaagatggcgactcttgattccgacgtgcctatggttcccgccggcgagccctcgagcagcgccggtccttcttccaagaagcccaagcgcttcgagatcaagaagtggaacgccgtcgctctctgggcttgggacatcgttgtcgataactgtgctatctgccggaaccacatcatggatctctgcatcgagtgccaagccaaccaggctagcgccactagcgaggaatgcactgtggcttggggagtttgtaaccatgcttttcacttccattgcatcagtcgatggctcaagactcgtcaagtttgtcctctagataacagtgagtgggagtttcagaaatatggccactagaattatgatgtggttgagctcctcggacatttggaccatctatcctagattttgaatatttactgttctatctgttattttcgtttgcttgtgtactgaatttattatgttcaagaaatcagcttgtctgatggaatttgatatacgccgtggtaacatgtaaagttttactttaatgttttatgtatttcatatgcttcctttcaaaaaaaaaaaaaaaaaa

SEQ ID NO: 10254 - protein, 116 aa, Glycine max; identical to SEQ ID NO: 3398
  misc_feature: Ceres CLONE ID no. 1614680
  misc_feature: Ceres CDNA ID no. 25893183
  misc_feature (83)..(104): Pfam Name: zf PFAM Desc: Zinc finger
  misc_feature: Homolog of GI Number: 83701143 NR Desc: RING
  misc_feature: Homolog of GI Number: 21592528 NR Desc: ring
  misc_feature: Homolog of GI Number: 31747517 NR Desc: ring box protein
  misc_feature: Homolog of GI Number: 55769719 NR Desc: putative ring
  misc_feature: Homolog of GI Number: 47087614 NR Desc: putative ring
  misc_feature: Homolog of GI Number: 50911983 NR Desc: putative RING box protein 1
  misc_feature: Homolog of GI Number: 7543891 NR Desc: ring
  misc_feature: Homolog of GI Number: 62652791 NR Desc:  similar to RBX1 protein
  misc_feature: Homolog of GI Number: 72018809 NR Desc:  similar to RING
  misc_feature: Homolog of GI Number: 48095046 NR Desc: similar to ENSANGP00000010437

SEQ ID NO: 10255 - DNA, 1004 bp, Glycine max
  misc_feature: Ceres CLONE ID no. 1614684
  misc_feature: Ceres CDNA ID no. 25402491
  CDS (125)..(745): REFERENCED BY SEQ ID NO: 10256
atataaagaagatcgacgcggggtggaggtgaggtgaagtctggaaagaccagcgtgcaggttcttcaatcttctagagagagaaagttaaagattgaaatttggatcggagagagagagagagatggcgttgaatcctcaattgtttcctaatggaatgcccgttcctttcgtgaacgagatgtttgtgttggccagagacggcgtcgaattcgaggtcgataagattcctgcctctggaaatcatgggggtcatctcaaaacaaagggaatcgtgtatttgtcaaatattcggatggtcttcgttgctaaaagttcagttggacacttcactgcttttgatatgcctttgctttacatccatggtgaaaaatttaaccagcctatatttcactgcaacaatctttctggacatgttgagcctgtagtcccaaatgacgaacacagagctctttactctacacactcatttaagatcttattcaaagagggaggctgtggaaccttcatccctctcttcttcaatttgattacttcagtgaggcagtataatcaacatgctaatatgcagacacaaacttatgtggatcctttgcaggcatctcagactccggttgatgagatgatgagacacgcatatgttgatcctaatgatccgacaaaaatatttctgcaacaacccacttctgattctcagcttaggcgtcgaacatatcagccacagacagatggaggccatgtctaagtctgaaattacactctcctcacgttcatcgtatgatgtttatatgggaattgtgtattaatacatcaaaataaacaaaaatcttatgagagactgagtatgtgtttggatctatgttgatagaatttattttagatcaatgtgattatatagaattgattctgaagtaatgtatttcttttgtttgcataagagatattaaagaagttatttttaagaaaatgttcgttggatttcttgttgaaaaaaaaaaaaaaaa

SEQ ID NO: 10256 - protein, 206 aa, Glycine max
  misc_feature: Ceres CLONE ID no. 1614684
  misc_feature: Ceres CDNA ID no. 25402491
  misc_feature: Homolog of GI Number: 23479181 NR Desc: arabinogalactan protein
MALNPQLFPNGMPVPFVNEMFVLARDGVEFEVDKIPASGNHGGHLKTKGIVYLSNIRMVFVAKSSVGHFTAFDMPLLYIHGEKFNQPIFHCNNLSGHVEPVVPNDEHRALYSTHSFKILFKEGGCGTFIPLFFNLITSVRQYNQHANMQTQTYVDPLQASQTPVDEMMRHAYVDPNDPTKIFLQQPTSDSQLRRRTYQPQTDGGHV

SEQ ID NO: 10257 - DNA, 914 bp, Glycine max
  misc_feature: Ceres CLONE ID no. 1614686
  misc_feature: Ceres CDNA ID no. 29191648
  CDS (147)..(692): REFERENCED BY SEQ ID NO: 10258
atactcattttcgcgtgtttgcttgctctagatctgattagcttttattcgagttctggttccttgtttcgtccctgcataatctgaattcaaatacttgccatcttgttacttgttatgctaccagatctgttttgaattaagagatggggttgtctttcaccaagctttttagccggctctttgccaagaaagagatgcgtattctcatggtaggtcttgatgctgctggtaagactaccatcttgtacaagctcaagctgggagaaattgtcacaaccattcccacaattggatttaatgtggagactgtggaatataagaatattagctttactgtatgggatgtgggtggccaagataagattcgtcctttatggagacactacttccaaaacactcaggggcttatctttgttgtggatagcaatgatcgtgaccgtgttgttgaggctagagatgagctccaccggatgttgaatgaggatgagttgagagatgctgttctcctggtatttgccaacaaacaagatcttccaaatgctatgaatgctgcagaaatcacagacaagcttggtcttcattctcttcgccaacgccactggtatatccagagcacatgtgctacctctggggaaggactatatgaaggactggagtggctctccaacaatatagctaacaaggcttagggacattttgtggaatgccgctatttcttgcttattatattatgaggttgatgggttgctgcttctcttatatagcattataatatatatatatattttactcttttaagtcttttctttttctttatttaggtgtttgatactatatcatagcaatcgtattgaatcctgtagaatttttaaataattaatgaattacaaactataaaaaaaaaaaaaaaa

SEQ ID NO: 10258 - protein, 181 aa, Glycine max; identical to SEQ ID NO: 5248
  misc_feature: Ceres CLONE ID no. 1614686
  misc_feature: Ceres CDNA ID no. 29191648
  misc_feature: null
  misc_feature: Useful for making plants with altered Lignin content
  misc_feature: Useful for making plants with altered alkaloid content
  misc_feature: Homolog of GI Number: 77812440 NR Desc: ADP ribosylation factor 002
  misc_feature: Homolog of GI Number: 11131026 NR Desc: ADP
  misc_feature: Homolog of GI Number: 47026845 NR Desc: ADP
  misc_feature: Homolog of GI Number: 34909214 NR Desc: putative ADP
  misc_feature: Homolog of GI Number: 50511366 NR Desc: ADP
  misc_feature: Homolog of GI Number: 37791223 NR Desc: ARF
  misc_feature: Homolog of GI Number: 39653273 NR Desc: ADP
  misc_feature: Homolog of GI Number: 29028258 NR Desc: ADP
  misc_feature: Homolog of GI Number: 77999271 NR Desc: ADP
  misc_feature: Useful for increasing seed/fruit yield or modifying fruit content
  misc_feature: Useful for making ornamental plants with modified leaves
  misc_feature: Useful for sterility

SEQ ID NO: 10259 - DNA, 828 bp, Glycine max
  misc_feature: Ceres CLONE ID no. 1614696
  misc_feature: Ceres CDNA ID no. 25447534
  CDS (324)..(605): REFERENCED BY SEQ ID NO: 10260
agtaagggtggctggaattttcagcttttcattttgccccccccccccccccccccttttcctttcatttcactatcataacttgagttgaacacgttcccgagacatctcaaatttcctctgctgagaatttcacgagtttatgagccacaaatgcaagtgggaacgaagaatggggtttggagttagtttggacaagtggtgtggtgtggtgtcctatgtaatgagtgcacatatgtgaagtgaaaattcctcatccttttcctcttttttcacgccttaatttctctctctctggaatttggagcaacagccagcactctatggattctctgcttggtaattggccatcctttgatcctcacaacttcagtcagcttcgaccttccgatccttctagttcttctagaatgacgctacccacttaccatcctacgcacagcaggacccttccagcacctgatcaagtgataagtacagaagccaaaaatatcctggtgagacacatttatcaacatgctgaggagaagttgaaaccgaaaagagctgcatctgataaccttttgcctgatcatggatgcaagcaacctagggtttctagttgacagtggccatcaaccaactgttgtatgtgattgtgagtaagtttccaaaaatatatccttagaagagtttggtgcttgtttagaatttgaacgattttggccagttacatagacttgggagtgtgtaaacataaacctaataatcagtcaaaatttaaactgaaagaaataatgacgatttcattgtgtatgtttatgccatattgttaacaaaaaaaaaaaa

SEQ ID NO: 10260 - protein, 93 aa, Glycine max
  misc_feature: Ceres CLONE ID no. 1614696
  misc_feature: Ceres CDNA ID no. 25447534
MDSLLGNWPSFDPHNFSQLRPSDPSSSSRMTLPTYHPTHSRTLPAPDQVISTEAKNILVRHIYQHAEEKLKPKRAASDNLLPDHGCKQPRVSS

SEQ ID NO: 10261 - DNA, 1014 bp, Glycine max
  misc_feature: Ceres CLONE ID no. 1614711
  misc_feature: Ceres CDNA ID no. 25402492
  CDS (120)..(821): REFERENCED BY SEQ ID NO: 10262
aacgtgctctccttccaatcacactcacaataacaaactaaccaattcaaagttcacacacacacacagcttgggaagaaaatcgagaattttccgagaaaatccgaagaaggcgggccatggtttccccggaaaacagcaattggctgttcgattacccgctgatcgacgacgttattcccgtcggcgacgcctccttttccgtctccgcctccgccttctcctggcccccacctcccgccaatgtcagtgttgaaattgatgcttcgcttggggattctgatggccccaaagatactgctttgaagaaaagggctagatgtgattcaagtactgcttctagctctaaagcgtgtcgggagaagttgcggagggataggcttaatgacaaatttgttgaattgggctccatcttggagcctggaaggcctcccaaaacagacaaggctgccattctgattgatgctgcccgaatggtaacacagctgcgggatgaagccctgaagttgaaagactcaaatacgagtcttcaagagaagattaaagagttaaaggctgagaagaatgaacttcgtgacgagaaacagaggcttaaggcagagaaagagaagttggagatgcaggtaaaatcaatgaatgctcaacctgctttcttgccaccccctcctgcaatccctgctgcatttgctccacaaggccaagcccccggcaacaagttgatgcctttcatcaggtacccgggagttgccatgtggcaatttatgcctccggccaccatggatacctcccaggatcatgttctccgtccaccagttgcctaagttggcattgtacaattgtttgggcttccattttggcccaaaagttgtattcgttttcccatagctttttagttattatcttctaagtgttccaagtaactggattcagtggtggctttgactgtatttggcttctgatactattatgaagtataatagctggtatttgcatgaaaaaaaaaaaaaaaaaaaa

SEQ ID NO: 10262 - protein, 233 aa, Glycine max
  misc_feature: Ceres CLONE ID no. 1614711
  misc_feature: Ceres CDNA ID no. 25402492
  misc_feature (73)..(124): Pfam Name: HLH PFAM Desc: Helix
  misc_feature: Homolog of GI Number: 21592325 NR Desc: bHLH transcription factor
  misc_feature: Homolog of GI Number: 20127115 NR Desc: putative bHLH transcription factor
  misc_feature: Homolog of GI Number: 50940947 NR Desc: helix
  misc_feature: Homolog of GI Number: 29367409 NR Desc: helix
  misc_feature: Homolog of GI Number: 51979114 NR Desc: PREDICTED OJ1442_E05.19 gene product
  misc_feature: Homolog of GI Number: 20127030 NR Desc: putative bHLH transcription factor
  misc_feature: Homolog of GI Number: 51536178 NR Desc: basic helix
  misc_feature: Homolog of GI Number: 23308269 NR Desc: At4g36060/T19K4_190
  misc_feature: Homolog of GI Number: 22329204 NR Desc: basic helix
  misc_feature: Useful for making lethal plants for genetic confinement systems
MVSPENSNWLFDYPLIDDVIPVGDASFSVSASAFSWPPPPANVSVEIDASLGDSDGPKDTALKKRARCDSSTASSSKACREKLRRDRLNDKFVELGSILEPGRPPKTDKAAILIDAARMVTQLRDEALKLKDSNTSLQEKIKELKAEKNELRDEKQRLKAEKEKLEMQVKSMNAQPAFLPPPPAIPAAFAPQGQAPGNKLMPFIRYPGVAMWQFMPPATMDTSQDHVLRPPVA

SEQ ID NO: 10263 - DNA, 1049 bp, Glycine max
  misc_feature: Ceres CLONE ID no. 1614766
  misc_feature: Ceres CDNA ID no. 25447166
  CDS (170)..(754): REFERENCED BY SEQ ID NO: 10264
atagatggtaactaagaaggtggtgaggctgacctcagagcagtagatggcttccacttccatagttccattccagctcttaacaattacatgagacagagaaagggttgacggacagagaacccaccttttgttgtattgcagatccatccgctctgccaccaggtgaatggaaggaagtggcggtggcggtgcttcaccgtctgcaccggtgaagcagtatttgcacgatttctcgaagctgtttcagtactatctggataaatccactccacattccacgtacagatggattgggactttcgtgatagcatccatctacgttttgcgcgttgtttatgtgcagggtttttacattgtctcttatggactcggaatctaccttctgaatctcttgattggttttctctcccctttggttgatcctgagctcgatccctccgactcccctttgcttccaaccaaaggctccgatgagttcaaacccttcattcgccgccttccggagttcaagttctggtattctttcaccaaggctctctgcatagcgtttgtgatgacctttttttccctgtttgatgttcctgtcttttggcctatattactctgttactggtttgttctctttgtccttacaatgaggcgccaagttgctcacatgatcaaatacaaatatatccccttcaacttggggaagcagaagtatagcggtaataaatcttctgcaaggagcagtagctctcgtgcagactgaaacttgtctctcatgattggaagatctacttagttaggttttctgaacattcaggctagtcaatgccccccttttctatgaaagaatttgtattcatggtattatggatgtcagtatgcattatgctgttacggaaaatcttaatgtccactcgttttattatacatgaagacgtgctaatattgatagtgaatctcattgtcagtgcacgttattgattggacttttcttgtaaatctcagcttgtattgtgaatttgtgatgctgtaattttttcaaaaaaaaaaaaaaaaaa

SEQ ID NO: 10264 - protein, 194 aa, Glycine max; identical to SEQ ID NO: 6454
  misc_feature: Ceres CLONE ID no. 1614766
  misc_feature: Ceres CDNA ID no. 25447166
  misc_feature (2)..(182): Pfam Name: Rer1 PFAM Desc: Rer1 family
  misc_feature: Homolog of GI Number: 21617987 NR Desc: AtRer1B
  misc_feature: Homolog of GI Number: 21360413 NR Desc: At2g21600/F2G1.13
  misc_feature: Homolog of GI Number: 24030322 NR Desc: putative AtRer1A protein
  misc_feature: Homolog of GI Number: 53792604 NR Desc: putative endoplasmatic reticulum retrieval protein Rer1B
  misc_feature: Homolog of GI Number: 34894094 NR Desc: putative Rer1A protein
  misc_feature: Homolog of GI Number: 50508264 NR Desc: putative AtRer1A
  misc_feature: Homolog of GI Number: 50943925 NR Desc: putative endoplasmatic reticulum retrieval protein Rer1B
  misc_feature: Homolog of GI Number: 21554351 NR Desc: putative integral membrane protein
  misc_feature: Homolog of GI Number: 30682033 NR Desc: RER1C protein
  misc_feature: Homolog of GI Number: 25411844 NR Desc: probable integral membrane protein

SEQ ID NO: 10265 - DNA, 965 bp, Glycine max
  misc_feature: Ceres CLONE ID no. 1614772
  misc_feature: Ceres CDNA ID no. 25402493
  CDS (148)..(789): REFERENCED BY SEQ ID NO: 10266
acgtaacgcatttaatttaattattggaagatgtcaaggcacgaacttctataataataagctcctacgacagcagatcataagcgcagttcgttccacgttgttgtccgctctgtggctctctacatttcatcattcatcggaaaaatggctctcgaggttgctgttaaggctgctgttggtgctccaaatgttctcggagattgtccattttcccaaagggtcctcttaactttagaggagaagaaaatcccttacaaactccacctcatcgatctcagtagtaaacccgaatggtttttgggtgtgaatcccgaagggaaggtgccagtggttctttttgatggcaaatgggtggctgattctgatgtgattgtggggatactcgaggaaaagtacccagaaccctctctcgtcactcctcctgaatttgcctccgtgggatcaaagatatttgggtcttttgtgagttttttgaagagcaaggatacaaacgatggaactgagcaaacgttggttgctgaattgagtgccttggatgaacatctcaaggcccatggtccatacattgctggggagaaagtcactgctgttgatctgagtttggcacccaaactgtaccatcttgtggtagcactgagtcacttcaagaattggaatattccagaaagtttgacacatgtccacaactacactaagctgctcttctcccgggagtcatttgagaaaacaaagcctccaaaggtagaatatgttattagtggatgggcgcctaaggtgaatgcttgaagtaattctaaattatgagatatctgaacatcagatatgtaatgtactgtgactgaaccttgttaagaataggatggcgaactcatgatgtttttcaagagtattgttccccttttaataataaacatgtagtttgttggtgtgtttattggtgatgtaaaaaaaaaaaaaaaaaa

SEQ ID NO: 10266 - protein, 213 aa, Glycine max
  misc_feature: Ceres CLONE ID no. 1614772
  misc_feature: Ceres CDNA ID no. 25402493
  misc_feature (119)..(160): Pfam Name: GST_C PFAM Desc: Glutathione S
  misc_feature (14)..(82): Pfam Name: GST_N PFAM Desc: Glutathione S
  misc_feature: Homolog of GI Number: 21593056 NR Desc: GSH
  misc_feature: Homolog of GI Number: 50058092 NR Desc: dehydroascorbate reductase
  misc_feature: Homolog of GI Number: 30023664 NR Desc: At1g75270
  misc_feature: Homolog of GI Number: 28192427 NR Desc: dehydroascorbate reductase
  misc_feature: Homolog of GI Number: 78191422 NR Desc: dehydroascorbate reductase
  misc_feature: Homolog of GI Number: 76160951 NR Desc: dehydroascorbate reductase
  misc_feature: Homolog of GI Number: 66475036 NR Desc: dehydroascorbate reductase
  misc_feature: Homolog of GI Number: 9795585 NR Desc: Putative GSH
  misc_feature: Homolog of GI Number: 55168334 NR Desc: dehydroascorbate reductase
  misc_feature: Homolog of GI Number: 28192421 NR Desc: dehydroascorbate reductase
  misc_feature: Useful for delaying flowering time
  misc_feature: Useful for making ornamental plants with modified flowers
  misc_feature: Useful for making plants with altered leaf shape eg curled leaves
  misc_feature: Useful for making taller plants and plants with longer inflorescences
  misc_feature: Useful for sterility
  misc_feature: Useful for sterility
MALEVAVKAAVGAPNVLGDCPFSQRVLLTLEEKKIPYKLHLIDLSSKPEWFLGVNPEGKVPVVLFDGKWVADSDVIVGILEEKYPEPSLVTPPEFASVGSKIFGSFVSFLKSKDTNDGTEQTLVAELSALDEHLKAHGPYIAGEKVTAVDLSLAPKLYHLVVALSHFKNWNIPESLTHVHNYTKLLFSRESFEKTKPPKVEYVISGWAPKVNA

SEQ ID NO: 10267 - DNA, 875 bp, Glycine max
  misc_feature: Ceres CLONE ID no. 1614778
  misc_feature: Ceres CDNA ID no. 25892693
  CDS (302)..(634): REFERENCED BY SEQ ID NO: 10268
gtccccttctcttcaatcatactttcacgagcttcaatcccttcttcgtctaatatctatacctctacacgacgccgttccgcagggcgtcagcaaccaacccctctcaaactatttttctatttcgctgaagttgctccgccaaaggatatatcatcaataatgcgaaattgaagcctgaactctgaactttacactcttgttcatgctatttacttcaatgttttctgtatagacatgcagcagttgtcattcaaaagtccaacataaacaatattcaatctcactgtattttgaaacaatgccacatattggtctggcactgatggaggccaaattttttcgctttctcaagattgtgggtgttggatacaaagctagagctgaagctgcgggtcgtctattgtatctcaaattggggtacagtcatgaggtggaattaactgttcctcctgctgtccgtgttttctgcttcaaaaacaatgtaatttgctgtactggaatagacaagcaaagggtgcaccagtttgctgctactgttcggacttgtaagccacccgaagtttacaaaggcaagggcataatgtatgttgatgaagttatcaagaaaaaacaaggaaagaagtcaaaatgatcatataatttttggtgatggctagaccttgtcggcagaatgattcactctagctttcaaacaattttgagtgttggaatccttcaacagagcattatggtaatcaagtatttgctttgaaataacgataatttcttctttcagtattgatatggatctttttaggttttatcttatgttgttgagacattttatcaaagaatatgatatcatcttaaaactcaaaaaaaaaaaaaaaaaa

SEQ ID NO: 10268 - protein, 102 aa, Glycine max
  misc_feature: Ceres CLONE ID no. 1614778
  misc_feature: Ceres CDNA ID no. 25892693
  misc_feature (12)..(89): Pfam Name: Ribosomal_L6 PFAM Desc: Ribosomal protein L6
  misc_feature: Homolog of GI Number: 25411865 NR Desc: probable ribosomal protein L6
  misc_feature: Homolog of GI Number: 21594402 NR Desc: putative ribosomal protein L6
  misc_feature: Homolog of GI Number: 50428724 NR Desc: putative ribosomal protein L6
  misc_feature: Homolog of GI Number: 50946987 NR Desc: putative ribosomal protein L6
  misc_feature: Homolog of GI Number: 786209 NR Desc: rpl6
  misc_feature: Homolog of GI Number: 32966605 NR Desc: ribosomal protein L6
  misc_feature: Homolog of GI Number: 22417017 NR Desc: ribosomal protein L6
  misc_feature: Homolog of GI Number: 78611006 NR Desc: 50S ribosomal protein L6
  misc_feature: Homolog of GI Number: 6066163 NR Desc: ribosomal protein L6
  misc_feature: Homolog of GI Number: 50918761 NR Desc: putative  ribosomal protein L6
MEAKFFRFLKIVGVGYKARAEAAGRLLYLKLGYSHEVELTVPPAVRVFCFKNNVICCTGIDKQRVHQFAATVRTCKPPEVYKGKGIMYVDEVIKKKQGKKSK

SEQ ID NO: 10269 - DNA, 700 bp, Glycine max
  misc_feature: Ceres CLONE ID no. 1614782
  misc_feature: Ceres CDNA ID no. 29191649
  CDS (73)..(525): REFERENCED BY SEQ ID NO: 10270
agtttgcagcatcagctttgaacgccgaagaaggttcatccaatccccgaagcccttcaccgcattgcaaccatgtcgaggagaaaggtcagagagccaaaggaagaaaacgtgactctgggcccagctgttagagatggtgaacatgtctttggcgtcgctcgcatctttgcctccttcaatgataccttcattcatgtcactgatttgtctgggagggaaacgcttgtccgcatcactggtggaatgaaggttaaggctgacagagatgaatcgtctccttatgctgctatgcttgcagctcaggatgttgctgccagatgcaaggaacttggcataactgctcttcatatcaagctccgtgccactggtggaaacaagacaaagacacctggccctggtgctcaatcagctcttcgtgcccttgctcgttcaggaatgaaaattggtcgtatagaggatgtgactcccattccttcggatagcactcgtagaaagagtggtagaaggggtagaaggctttaaacttcttgtggtatatgtctggagttgctatattttaatttccatgctagacagaattgtggcattttgaaattttgcttaatttaatatcagaacttctattgtatttcttgaggtttttaacagaatttagttgagacatttagacatcattgttaaaaaaaaaaaaaaaaaa

SEQ ID NO: 10270 - protein, 150 aa, Glycine max
  misc_feature: Ceres CLONE ID no. 1614782
  misc_feature: Ceres CDNA ID no. 29191649
  misc_feature: The plant is abnormally large.
  misc_feature: Useful for making plants with modulated biomass
  misc_feature (28)..(146): Pfam Name: Ribosomal_S11 PFAM Desc: Ribosomal protein S11
  misc_feature: Homolog of GI Number: 2565340 NR Desc: ribosomal protein S14
  misc_feature: Homolog of GI Number: 50905421 NR Desc: putative ribosomal protein S14
  misc_feature: Homolog of GI Number: 28436071 NR Desc: cytoplasmic ribosomal protein S14
  misc_feature: Homolog of GI Number: 50924099 NR Desc: OJ000126_13.9
  misc_feature: Homolog of GI Number: 131772 NR Desc: 40S ribosomal protein S14
  misc_feature: Homolog of GI Number: 21618105 NR Desc: putative ribosomal protein S14
  misc_feature: Homolog of GI Number: 131773 NR Desc: 40S ribosomal protein S14
  misc_feature: Homolog of GI Number: 77745450 NR Desc: ribosomal protein S14
  misc_feature: Homolog of GI Number: 21595448 NR Desc: putative 40S ribosomal protein S14
  misc_feature: Homolog of GI Number: 21593698 NR Desc: 40S ribosomal protein S14
  misc_feature: Useful for decreasing plant size
  misc_feature: Useful for making larger plants
  misc_feature: Useful for making ornamental plants with modified flowers
  misc_feature: Useful for making plants with altered leaf shape eg curled leaves
  misc_feature: Useful for sterility
MSRRKVREPKEENVTLGPAVRDGEHVFGVARIFASFNDTFIHVTDLSGRETLVRITGGMKVKADRDESSPYAAMLAAQDVAARCKELGITALHIKLRATGGNKTKTPGPGAQSALRALARSGMKIGRIEDVTPIPSDSTRRKSGRRGRRL

SEQ ID NO: 10271 - DNA, 1860 bp, Zea mays
  misc_feature: Ceres CLONE ID no. 1616436
  misc_feature: Ceres CDNA ID no. 36707508
  CDS (213)..(1391): REFERENCED BY SEQ ID NO: 10272
accacccactccctcgtccagagtccagacccagaaggagagggagacagaggagaggaggagcagcgtggcgacgcccaaatcgagcgacctgatcgagtcccctcgccccaactcactgaatcccaatccgagcccgccaattgggcgccccacccacgccaagatgaagcgagctcgaaggcgtatgtgcaagagatgactgatgagggatgctagtgacattgatgaacttgttacgggcgtgctggcgaccgtcatcgaaccggcatgcccgaacaggctcagatgttaccggtaggcaggatggacttctatggtacaaggacgccgggcagcatgtcaacggggagttttccatggctgttgttcaggccaataacttacttgaggaccagtgtcagattgagtcgggtccactgagttttctagattccggaccatatggcacttttgttggcgtttacgatggacatggtggtccagagacggcctgctatatcaatgatcatctcttccagaatctgaaaaggtttgcatctgagcagaatacaatgtctgctgatgtactgaagaaggcgtatgaagctacagaagatggattcttttctgttgttaccagacaatggcctgtaaagcctcagatagcagctgtcggctcatgctgcctggtcggtgtaatttgtggtggcatgctttatgttgccaatgttggggattcccgtgttgttttaggaagacatgttaaggctactggagaagttttggctatccaattgtcagcagagcataatgtaagtattgagtcagtgagaaaagaactgcagtcaatgcacccagaagataggcacattgttgttctcaagcacaatgtttggcgtgtaaaaggactaattcaggtttgtagatcaatcggtgatgcttatctcaagaagcaagagttcaatagggaacccctatatgtgaaatttcggcttcgtgaaccttttcacaagccgatactaagttcagaaccatcaatcaatgtgcgaccactacaaccacacgaccagtttctcatatttgcatctgatggactttgggagcacttaaccaaccaagaagctgttgatattgttcacagtagcccccgcagtggctgtgctaggaggctgataagagcggcgctgcaagtggcagccaagaaaagggagatgaggtactcagacctcaagaagatcgaccgcggtgttcgccgccacttccacgacgacataacagtcatagtagtgttccttgattccagcctcgtgagcaaggcgagcgcgcaccgaggccccactctttccctgcgaggcggcggtgccagcgctggtctgcgcagcaacacgcttgcaccaacatcaatgtgactatgaggaggctacaaccctgactggaagacgttttctttcctcgtgtcgaatgtgttatatacgtacttgtaccggccaaggtcatccatctcccctcaatggtgtaaagaactaggagaggcgtggaagctcctctccagcgtctttgaatgccctcaatggtgtcaaggtgtggactcaagtcaatagcttcgctgttctgatgatgctctgtggaaactcgaatcctttccacctgaaaaccaagtagtatgtcttctagtgctggaattaaccctagtgcatatatacatatgaaataaaaaaaaagccaaaaggaggagtaacttatttaactgatgctgtgaggtgtatgtatgttttgtactgtatgtgtactgattttgactgctactgcatatactgttgttaatcgaccgctggtaaagtgaaatcgctgatttcgtcttaaaaaaaaaaaaaaaaa

SEQ ID NO: 10272 - protein, 392 aa, Zea mays
  misc_feature: Ceres CLONE ID no. 1616436
  misc_feature: Ceres CDNA ID no. 36707508
  misc_feature (81)..(327): Pfam Name: PP2C PFAM Desc: Protein phosphatase 2C
  misc_feature: Homolog of GI Number: 59958308 NR Desc: At4g38520
  misc_feature: Homolog of GI Number: 7768153 NR Desc: protein phosphatase 2C
  misc_feature: Homolog of GI Number: 4206122 NR Desc: protein phosphatase 2C homolog
  misc_feature: Homolog of GI Number: 6572058 NR Desc: protein phosphatase 2C
  misc_feature: Homolog of GI Number: 10177123 NR Desc: protein phosphatase 2C
  misc_feature: Homolog of GI Number: 20340237 NR Desc: protein phosphatase 2c
  misc_feature: Homolog of GI Number: 42569633 NR Desc: protein phosphatase 2C family protein / PP2C family protein
  misc_feature: Homolog of GI Number: 30690552 NR Desc: protein phosphatase 2C family protein / PP2C family protein
  misc_feature: Homolog of GI Number: 50924039 NR Desc: OSJNBb0118P14.8
MLVTLMNLLRACWRPSSNRHARTGSDVTGRQDGLLWYKDAGQHVNGEFSMAVVQANNLLEDQCQIESGPLSFLDSGPYGTFVGVYDGHGGPETACYINDHLFQNLKRFASEQNTMSADVLKKAYEATEDGFFSVVTRQWPVKPQIAAVGSCCLVGVICGGMLYVANVGDSRVVLGRHVKATGEVLAIQLSAEHNVSIESVRKELQSMHPEDRHIVVLKHNVWRVKGLIQVCRSIGDAYLKKQEFNREPLYVKFRLREPFHKPILSSEPSINVRPLQPHDQFLIFASDGLWEHLTNQEAVDIVHSSPRSGCARRLIRAALQVAAKKREMRYSDLKKIDRGVRRHFHDDITVIVVFLDSSLVSKASAHRGPTLSLRGGGASAGLRSNTLAPTSM

SEQ ID NO: 10273 - DNA, 426 bp, Glycine max
  misc_feature: Ceres CLONE ID no. 1617053
  misc_feature: Ceres CDNA ID no. 29191610
  CDS (53)..(208): REFERENCED BY SEQ ID NO: 10274
agctattcaacttgctcgtctcctgcggcgtgttcaacaatcggcggcgaaaatgccttcccacaagacgttcagaatcaagaagaagctcgcgaagaagatgaggcagaacagacccatcccttattggatccgcatgagaaccgacaacactatcaggtacaatgctaagcgcaggcactggcgccgcaccaagctcggattttaaggtccatgtcaacctccgactcgagatttttatattgtttttgttattctagaatgttactagcaatgtgtaaactggaaaggttttagcttttggtcatgtggtcacacagagggatcattgttgagcgtttccatatctctattttgtttttgtactttttttggatattaatctgagactgagatggtagttttcaaaaaaaaaaaaaaaaaaaa

SEQ ID NO: 10274 - protein, 51 aa, Glycine max; identical to SEQ ID NO: 2406
  misc_feature: Ceres CLONE ID no. 1617053
  misc_feature: Ceres CDNA ID no. 29191610
  misc_feature (9)..(51): Pfam Name: Ribosomal_L39 PFAM Desc: Ribosomal L39 protein
  misc_feature: Homolog of GI Number: 50915614 NR Desc: putative 60S ribosomal protein L39
  misc_feature: Homolog of GI Number: 50915618 NR Desc: 60S RIBOSOMAL PROTEIN L39
  misc_feature: Homolog of GI Number: 55773789 NR Desc: 60S ribosomal protein L39
  misc_feature: Homolog of GI Number: 57471714 NR Desc: ribosomal protein L39
  misc_feature: Homolog of GI Number: 21618028 NR Desc: putative ribosomal protein L39
  misc_feature: Homolog of GI Number: 24266968 NR Desc: ribosomal protein L39
  misc_feature: Homolog of GI Number: 66934980 NR Desc: ribosomal protein L39
  misc_feature: Homolog of GI Number: 67084113 NR Desc: ribosomal protein L39
  misc_feature: Homolog of GI Number: 58394407 NR Desc: ENSANGP00000020220
  misc_feature: Homolog of GI Number: 72073922 NR Desc:  similar to 60S ribosomal protein L39

SEQ ID NO: 10275 - DNA, 558 bp, Glycine max
  misc_feature: Ceres CLONE ID no. 1617166
  misc_feature: Ceres CDNA ID no. 29191355
  CDS (61)..(378): REFERENCED BY SEQ ID NO: 10276
attttcgcggcgcaaagctgaagtgtctgcttcttccgattccggcacgcccccatcaccatggtgaacgttccgaaaacaaagaagacatactgcaagagtaaggagtgcaggaagcacaccctgcacaaggttacccaatacaagaagggtaaagatagcattgctgcccaaggaaaacgccgttacgatcgcaaacaatctggttatggcggacaaactaagcccgtcttccacaagaaggctaagaccaccaagaagattgttctgaggttgcaatgccagggttgcaagcatgtctcccaacacgctattaagaggtgcaagcactttgagattggtggtgacaagaagggcaagggaacatctctgttctagtttgcgaattaggattcgcagctttttatgtttcagcaatgttggaatcttttagtttctctctggatttttctgcccagttatattttattattttgcaataccctcgtgattgagaaattaaaactatttttgctaatttcaacgattgcaatcttaatctaaaaaaaaaaaaaaaaa

SEQ ID NO: 10276 - protein, 105 aa, Glycine max; identical to SEQ ID NO: 3358
  misc_feature: Ceres CLONE ID no. 1617166
  misc_feature: Ceres CDNA ID no. 29191355
  misc_feature (19)..(95): Pfam Name: Ribosomal_L44 PFAM Desc: Ribosomal protein L44
  misc_feature: Homolog of GI Number: 1553131 NR Desc: ribosomal protein L44 isoform b
  misc_feature: Homolog of GI Number: 170920 NR Desc: ribosomal protein L41
  misc_feature: Homolog of GI Number: 15281775 NR Desc: 60S ribosomal protein L144
  misc_feature: Homolog of GI Number: 41152660 NR Desc: 60S ribosomal protein L44
  misc_feature: Homolog of GI Number: 34901296 NR Desc: putative 60S ribosomal protein L44
  misc_feature: Homolog of GI Number: 21553918 NR Desc: ribosomal protein
  misc_feature: Homolog of GI Number: 82621114 NR Desc: ribosomal protein L41
  misc_feature: Homolog of GI Number: 3128243 NR Desc: ribosomal protein L41
  misc_feature: Homolog of GI Number: 66852786 NR Desc: ribosomal protein L41
  misc_feature: Homolog of GI Number: 12083868 NR Desc: ribosomal protein L41

SEQ ID NO: 10277 - DNA, 576 bp, Glycine max
  misc_feature: Ceres CLONE ID no. 1617307
  misc_feature: Ceres CDNA ID no. 25891732
  CDS (50)..(451): REFERENCED BY SEQ ID NO: 10278
acaacacaagtattcaaaatatctctatatattccctccatttctgagaatggcgaaggctgcggagaagaagccagcggctgagaagtctccggcggagaagaagcctaaggcagagaaaaagattccgaaggaaggcggtggcgagaagaagaagaagaggtcgaagaagagcgtggagacctacaagatctatatcttcaaggtgctgaagcaggtacaccctgacatcggtatttctagcaaggccatggggatcatgaacagcttcatcaacgacatcttcgagaagctcgcgcaggaagcggcgcgtctcgccaggtacaacaagaagcctactattacctccagggagattcagaccgcggtcaggttggtgctgcccggggagcttgccaagcacgccgtttctgaaggaaccaaagccgttaccaagttcactagctcttagagttagggttttttttttttttttttttttctgtaaagctaagtcgtatagctagtggcttcttttcggattctatatgcctatgaatttgtgattctattagtcccaaaaaaaaaaaaaaaaaa

SEQ ID NO: 10278 - protein, 133 aa, Glycine max
  misc_feature: Ceres CLONE ID no. 1617307
  misc_feature: Ceres CDNA ID no. 25891732
  misc_feature: No seed is being produced by the plant
  misc_feature: The plant flowers significantly late compared to wild-type.
  misc_feature: Useful for biocontainment applications
  misc_feature: Useful for making plants with modulated flowering time
  misc_feature (40)..(112): Pfam Name: Histone PFAM Desc: Core histone H2A/H2B/H3/H4
  misc_feature: Homolog of GI Number: 7635498 NR Desc: histone H2B
  misc_feature: Homolog of GI Number: 6729516 NR Desc: histone H2B
  misc_feature: Homolog of GI Number: 2558962 NR Desc: histone H2B1
  misc_feature: Homolog of GI Number: 3021485 NR Desc: histone H2B
  misc_feature: Homolog of GI Number: 30024116 NR Desc: putative histone H4
  misc_feature: Homolog of GI Number: 531056 NR Desc: protein H2B
  misc_feature: Homolog of GI Number: 34908130 NR Desc: putative histone H2B
  misc_feature: Homolog of GI Number: 82400146 NR Desc: histone H2B
  misc_feature: Homolog of GI Number: 21617908 NR Desc: histone H2B
  misc_feature: Homolog of GI Number: 21553526 NR Desc: putative histone H2B
MAKAAEKKPAAEKSPAEKKPKAEKKIPKEGGGEKKKKRSKKSVETYKIYIFKVLKQVHPDIGISSKAMGIMNSFINDIFEKLAQEAARLARYNKKPTITSREIQTAVRLVLPGELAKHAVSEGTKAVTKFTSS

SEQ ID NO: 10279 - DNA, 698 bp, Glycine max
  misc_feature: Ceres CLONE ID no. 1617386
  misc_feature: Ceres CDNA ID no. 25402495
  CDS (1)..(405): REFERENCED BY SEQ ID NO: 10280
tatttgtctatttcagctcttccctctctcacccattcacacactgaaatgagcaatttccagagaatatcgcacgaatcctaccctcccccagggcacggatctccttaccctccaccccaaccgggttacccatcggcgccgcctcatgaagggtaccctccgccgccgccgcctccgggatatggtgggtaccctccaccgcatccgccgcagcgtccgccgtatgactcctaccagggctacttcgacaacgggcgtccaccgccacctccgccgccgcactaccattaccagcacgtggatcatcatcacctccacgatgagcccgggtgcttttcattcctgcgaggctgcatcgcagcactttgctgctgttgtgtgctagaggagtgttgcttctaataatcacaccacaaaagttgtttcttcagtttgctgcactttgttatggctctctagagaaatgtggctacaattctagataataagtgtgagaggtggcaagtattggtcattcttgtaactctggtcttttccctctaccctaaatcctggtctgtgcataggttctgtgatgtggtctatatgtgaattgctttgtacgaacactataatggaaaatgtaaaccgtttcttataaggtgtaacagacaatgatatggttaaatttgttacaaaaaaaaaaaaaaaaaaaa

SEQ ID NO: 10280 - protein, 118 aa, Glycine max
  misc_feature: Ceres CLONE ID no. 1617386
  misc_feature: Ceres CDNA ID no. 25402495
  misc_feature: Homolog of GI Number: 16974451 NR Desc: At1g12810/F13K23_4
  misc_feature: Homolog of GI Number: 8698728 NR Desc: Contains weak similarity to GATA
  misc_feature: Homolog of GI Number: 50948019 NR Desc: proline
  misc_feature: Homolog of GI Number: 42565788 NR Desc: proline
  misc_feature: Homolog of GI Number: 54289545 NR Desc: putative membrane protein
  misc_feature: Homolog of GI Number: 41529812 NR Desc: PGYRP protein
  misc_feature: Homolog of GI Number: 2494026 NR Desc: Histidine
  misc_feature: Homolog of GI Number: 7442094 NR Desc: extensin CYC15 precursor
  misc_feature: Homolog of GI Number: 7488999 NR Desc: extensin class I
MSNFQRISHESYPPPGHGSPYPPPQPGYPSAPPHEGYPPPPPPPGYGGYPPPHPPQRPPYDSYQGYFDNGRPPPPPPPHYHYQHVDHHHLHDEPGCFSFLRGCIAALCCCCVLEECCF

SEQ ID NO: 10281 - DNA, 432 bp, Glycine max
  misc_feature: Ceres CLONE ID no. 1617815
  misc_feature: Ceres CDNA ID no. 25447086
  CDS (83)..(208): REFERENCED BY SEQ ID NO: 10282
acacagctattcctcttaagcttgctactgagtttccacactgcataccttaggtcttccgaattcgaagttaatttgcaagatggctaaggaaaaggctcagatcaacattgtggtggttggtcatgtggaccctgaggaggcaaccaccattaacgagctgaagaagcctgttgtggagaaagaagctccagggcatgccatatgagggcatgcacgtacggcctcggaggggaaccagaaaattatgttaacaaaataatctggaaccctaatgtatcagtgtcatcatcagtgtgtagtttaagctagctttgctatggttacgttctttgagatgagagtcttgatgaacagtaccattctgatgtattgctttccttgaaagttaatgcatgcttcttatcttctgtctaaaaaaaaaaaaaaaaa

SEQ ID NO: 10282 - protein, 41 aa, Glycine max; identical to SEQ ID NO: 1944
  misc_feature: Ceres CLONE ID no. 1617815
  misc_feature: Ceres CDNA ID no. 25447086
  misc_feature: Homolog of GI Number: 83286887 NR Desc: auxin down
  misc_feature: Homolog of GI Number: 485513 NR Desc: ADR12

SEQ ID NO: 10283 - DNA, 567 bp, Glycine max
  misc_feature: Ceres CLONE ID no. 1617817
  misc_feature: Ceres CDNA ID no. 29191611
  CDS (58)..(375): REFERENCED BY SEQ ID NO: 10284
acattgtgctttcaccttggctccgctctttggtttgctcaaccgatctccgcagcaatggtgaacgttccgaagacaaagaagacctactgcaagagcaaggagtgcaggaagcacacgctccacaaggtcacccaatacaagaagggcaaggacagcatcgccgctcagggaaaacgccgttatgaccgcaaacagtccggttacggtggccagaccaagcccgttttccacaaaaaggcgaaaaccaccaagaaaattgtgttgaggctccagtgccaaggatgcaagcatgtctcgcagcacgctatcaagaggtgcaagcactttgagatcggtggtgacaagaagggaaaaggaacatctctcttctagatggaatattagaatttgcaatttcacacactctctgtacttttctcagtttgattgccatcttcggcttttaatttttgcagaaatattttgtgtttggggatgttagaatttgcaattttgtttttgtttatgcactgattatagtattaatgactagtttctcttcctttcaaaaaaaaaaaaaaaaaa

SEQ ID NO: 10284 - protein, 105 aa, Glycine max; identical to SEQ ID NO: 3358
  misc_feature: Ceres CLONE ID no. 1617817
  misc_feature: Ceres CDNA ID no. 29191611
  misc_feature (19)..(95): Pfam Name: Ribosomal_L44 PFAM Desc: Ribosomal protein L44
  misc_feature: Homolog of GI Number: 1553131 NR Desc: ribosomal protein L44 isoform b
  misc_feature: Homolog of GI Number: 170920 NR Desc: ribosomal protein L41
  misc_feature: Homolog of GI Number: 15281775 NR Desc: 60S ribosomal protein L144
  misc_feature: Homolog of GI Number: 41152660 NR Desc: 60S ribosomal protein L44
  misc_feature: Homolog of GI Number: 34901296 NR Desc: putative 60S ribosomal protein L44
  misc_feature: Homolog of GI Number: 21553918 NR Desc: ribosomal protein
  misc_feature: Homolog of GI Number: 82621114 NR Desc: ribosomal protein L41
  misc_feature: Homolog of GI Number: 66852786 NR Desc: ribosomal protein L41
  misc_feature: Homolog of GI Number: 3128243 NR Desc: ribosomal protein L41
  misc_feature: Homolog of GI Number: 12083868 NR Desc: ribosomal protein L41

SEQ ID NO: 10285 - DNA, 683 bp, Glycine max
  misc_feature: Ceres CLONE ID no. 1617916
  misc_feature: Ceres CDNA ID no. 35383481
  CDS (61)..(423): REFERENCED BY SEQ ID NO: 10286
ctctttttgctgtgggaagaggaaccctagctagggtttggaagaagctgatccgagaagatggtgcagcgtctcacctaccgcaaacgccacagctatgctaccaaatccaaccagcacagagtcgtcaagactcccggtggcaagcttgtttatcagaccacgaagaagagggccagcggacccaagtgccctgtcactggaaagaggattcaagggattccacatttaaggccagcagagtataatagatcaaggttacacagaaaccgaaggactgtgaaccgtgcatatggtggtgtgttgtctggcagtgctgttagagaaagaatcattcgagctttcttggttgaagagcaaaagattgtgaaaaaggtcttgaagatccaaaagacaaaggaaaaacaagctttgaagggctgagttttgagaaagagtgataaagatctttttggagggattttaggtttgggtgattatagtaaagcatgaaatttgttagagctgtttctgtgttaattttgtgcttatttggctttgttaaactcattctagtgcaactggtaactttgtcgacaactccattatgatacagtttttgtatgtcatgattttctcttgctggattattgattttatttctgcatattagtactttgctcgaaaaaaaaaaaaaaaaaaaa

SEQ ID NO: 10286 - protein, 120 aa, Glycine max
  misc_feature: Ceres CLONE ID no. 1617916
  misc_feature: Ceres CDNA ID no. 35383481
  misc_feature (5)..(103): Pfam Name: Ribosomal_L34e PFAM Desc: Ribosomal protein L34e
  misc_feature: Homolog of GI Number: 2119150 NR Desc: ribosomal protein L34
  misc_feature: Homolog of GI Number: 47824936 NR Desc: Ribosomal protein L34e
  misc_feature: Homolog of GI Number: 1076636 NR Desc: ribosomal protein L34
  misc_feature: Homolog of GI Number: 21436403 NR Desc: putative 60S ribosomal protein L34
  misc_feature: Homolog of GI Number: 21594659 NR Desc: 60s ribosomal protein L34
  misc_feature: Homolog of GI Number: 13194822 NR Desc: putative 60S ribosomal protein L34
  misc_feature: Homolog of GI Number: 50941301 NR Desc: putative ribosomal protein L34
  misc_feature: Homolog of GI Number: 50946109 NR Desc: putative ribosomal protein
  misc_feature: Homolog of GI Number: 20259165 NR Desc: putative 60S ribosomal protein L34
  misc_feature: Homolog of GI Number: 57471712 NR Desc: ribosomal protein l34
MVQRLTYRKRHSYATKSNQHRVVKTPGGKLVYQTTKKRASGPKCPVTGKRIQGIPHLRPAEYNRSRLHRNRRTVNRAYGGVLSGSAVRERIIRAFLVEEQKIVKKVLKIQKTKEKQALKG

SEQ ID NO: 10287 - DNA, 650 bp, Glycine max
  misc_feature: Ceres CLONE ID no. 1617937
  misc_feature: Ceres CDNA ID no. 35383482
  CDS (74)..(478): REFERENCED BY SEQ ID NO: 10288
gaaaagaggcgagggtagctcatgacatgttccttgaaggaaaaaaaacgcagttgaaagattgaagctcgagatgtcggggaaaggcgcaaagggtttgataactgctaagaacccttcttcctctaaggacaaagacaagaaaaaacccatttctcgctcctcaagagccggtcttcagttccctgttggacgcattcatcgtcttctgaagtcaagggtgacagcacatggaagagttggggcaacagctgcagtttattctgctgccatcctggagtatttaactgcagaggtgttggagttggccggcaatgcgagcaaagatctgaaggtgaagcgtattacccctagacatctacagctcgccatccggggagatgaagaacttgataccctcatcaaaggaacaatagctggtgggggtgttattcctcatatccacaagtcccttatcaacaagtcttcaaaggaatgaggagggtttatacattatttgaatcaagaaattgactgtaaatttggctatatcttttgatatggataatttgctccctgcattagtttggttgaactcaacttcaaaagaaatatgaaaatgtcttatttcttcatttgaaaaaaaaaaacaaaaaaaaaaaaaaaaaaaa

SEQ ID NO: 10288 - protein, 134 aa, Glycine max
  misc_feature: Ceres CLONE ID no. 1617937
  misc_feature: Ceres CDNA ID no. 35383482
  misc_feature (29)..(105): Pfam Name: Histone PFAM Desc: Core histone H2A/H2B/H3/H4
  misc_feature: Homolog of GI Number: 21536635 NR Desc: putative histone H2A
  misc_feature: Homolog of GI Number: 34902610 NR Desc: Putative histone H2A
  misc_feature: Homolog of GI Number: 21592838 NR Desc: histone H2A.F/Z
  misc_feature: Homolog of GI Number: 30024110 NR Desc: putative histone H2A
  misc_feature: Homolog of GI Number: 50918585 NR Desc: putative histone H2A protein
  misc_feature: Homolog of GI Number: 31432099 NR Desc: putative histone H2A
  misc_feature: Homolog of GI Number: 62319094 NR Desc: histone H2A
  misc_feature: Homolog of GI Number: 6319146 NR Desc: H2A protein
  misc_feature: Homolog of GI Number: 62087582 NR Desc: H2A histone family
  misc_feature: Homolog of GI Number: 76615576 NR Desc:  similar to H2A histone family
  misc_feature: Useful for making ornamental plants with modified flowers
MSGKGAKGLITAKNPSSSKDKDKKKPISRSSRAGLQFPVGRIHRLLKSRVTAHGRVGATAAVYSAAILEYLTAEVLELAGNASKDLKVKRITPRHLQLAIRGDEELDTLIKGTIAGGGVIPHIHKSLINKSSKE

SEQ ID NO: 10289 - DNA, 639 bp, Glycine max
  misc_feature: Ceres CLONE ID no. 1618083
  misc_feature: Ceres CDNA ID no. 29191612
  CDS (95)..(466): REFERENCED BY SEQ ID NO: 10290
atcttgaagtaatccactcacgggtttcttagagttgtgatcaactacgttacttctctcttggttttcttgatctccaccttcaccagttggaatggcaaggagctacttcaagcaagaacatgatcttgagaagagaagagctgaggctgctaggattagggagaaataccctgacaggattccggtaattgtggagaaggctgaaagaagtgacatcccaagtattgacaagaagaagtaccttgtccctgctgacttgactgtaggacagtttgtctatgtgatccgcaaaaggattaaattaagtgcagaaaaggcaatctttatatttgtggacaacgtccttcctcctacaggagcaattatgtctgccatatatgatgagaagaaggacgaggatgggtttctctatgttacatacagtggcgagaacacctttggggatctgatttccattcagtagccattataaattcacaccgtttgaccttgtggtctcattggtctgtctgataaatttgttatagtactcatgtcaagaaccttactctcgatgttttgtacagttgtatataaattccgtgaacttgatcaatattaaaagttctctcattcagtcaaaaaaaaaaaaaaaaa

SEQ ID NO: 10290 - protein, 123 aa, Glycine max
  misc_feature: Ceres CLONE ID no. 1618083
  misc_feature: Ceres CDNA ID no. 29191612
  misc_feature (14)..(117): Pfam Name: MAP1_LC3 PFAM Desc: Microtubule associated protein 1A/1B
  misc_feature: Homolog of GI Number: 21615419 NR Desc: microtubule associated protein
  misc_feature: Homolog of GI Number: 20147099 NR Desc: AT4g16520/dl4285c
  misc_feature: Homolog of GI Number: 40716445 NR Desc: microtubule
  misc_feature: Homolog of GI Number: 50941899 NR Desc: putative microtubial binding protein
  misc_feature: Homolog of GI Number: 21592920 NR Desc: putative microtubule
  misc_feature: Homolog of GI Number: 18389282 NR Desc: putative microtubule
  misc_feature: Homolog of GI Number: 30689948 NR Desc: autophagy 8e
  misc_feature: Homolog of GI Number: 4581162 NR Desc: putative microtubule
  misc_feature: Homolog of GI Number: 2072023 NR Desc: symbiosis
  misc_feature: Homolog of GI Number: 3024687 NR Desc: SYMBIOSIS
  misc_feature: Useful for accelerating flowering time
  misc_feature: Useful for making ornamental plants with modified flowers
  misc_feature: Useful for making plants with increased biomass and foliage
  misc_feature: Useful for making shorter plants
  misc_feature: Useful for making shorter plants and plants with modified flowers
  misc_feature: Useful for making smaller plants
  misc_feature: Useful for modifying plant structure
  misc_feature: Useful for sterility
MARSYFKQEHDLEKRRAEAARIREKYPDRIPVIVEKAERSDIPSIDKKKYLVPADLTVGQFVYVIRKRIKLSAEKAIFIFVDNVLPPTGAIMSAIYDEKKDEDGFLYVTYSGENTFGDLISIQ

SEQ ID NO: 10291 - DNA, 826 bp, Glycine max
  misc_feature: Ceres CLONE ID no. 1618112
  misc_feature: Ceres CDNA ID no. 29191791
  CDS (133)..(735): REFERENCED BY SEQ ID NO: 10292
atgccagttcagttagcccatgcaaagaggcagcaacaaaatgaccaactcaaagcctaaaacacatttcatttccaaaaaactaactctactctgaaagtgcatcattcctcctttgatcctctcttccccatgaccttccaacccgtccccactctccttctcttcctcctccttgcgtctgcaaattcccattttgccctcgccggaaagcgcaaggtccacatccccgacgagttggacgacgtgttcgacgacgaggaggacgacgcgtggcgagaatggggcaagaaacccgaaccctctttccctccctccgatatctccaagctcgatccctcgcagatccagcaggagatgatgaagcgccacgccggacccgtgatcggattcgtcaagctccggtcagggactcgccggactccggacatggtagctgaatttgcaatgaaatggacacatgttctgagaactggagctgttggagtaaggtttatgggtgttgatctgaatacaatcatgttcaacttggaaagcatcaaagacttggaagagttgaaggaatttgtcttggaccaatcagaggcatatgagatcaaaatgggggatcaattttttcgaagacctggagatccacctcttgatgaagttattgagaagcaaaatagtgagaaaggcaaagcagataatgctgattcagaggaaattgatccaaatgttaaaacagagttgtaattaaacggtatagacatagactatttttggttttgcgtcagttttaggaaaatcatgtcacatttccatgtaaaaaaaaaaaaaaaaaaaa

SEQ ID NO: 10292 - protein, 200 aa, Glycine max
  misc_feature: Ceres CLONE ID no. 1618112
  misc_feature: Ceres CDNA ID no. 29191791
MTFQPVPTLLLFLLLASANSHFALAGKRKVHIPDELDDVFDDEEDDAWREWGKKPEPSFPPSDISKLDPSQIQQEMMKRHAGPVIGFVKLRSGTRRTPDMVAEFAMKWTHVLRTGAVGVRFMGVDLNTIMFNLESIKDLEELKEFVLDQSEAYEIKMGDQFFRRPGDPPLDEVIEKQNSEKGKADNADSEEIDPNVKTEL

SEQ ID NO: 10293 - DNA, 528 bp, Glycine max
  misc_feature: Ceres CLONE ID no. 1618178
  misc_feature: Ceres CDNA ID no. 36706363
  CDS (72)..(344): REFERENCED BY SEQ ID NO: 10294
aaaaaaacctcttgttgagagttgaaacacacctactacaattgctaaagtcctttcttgtcatagcaaaaatgaagcttgtctttgccaccctactgttatgttctcttcttctaagctcctctttcttggagccagtcatcgcctatgaagactcgtcttattgcagcaacaagtgttcggacagatgctcatcggcaggggttaaggataggtgtctgaggtactgtggaatatgctgtgctgagtgcaaatgtgttccttctgggacctatgggaacaagcaccagtgtccttgctacagggacaagctcaacaagaagggcaagcccaaatgcccatgaagtcttgaactcaaagaccaagtcacatagagacttaagagaataagactggtgtttgtgtttacaattacatcgtgaattcccaagcataatggttggactcttgtttccaatgtctgttggatatatgttagatctgaacgggaataaattacatatcttggatgaaaaaaaaaaaaaaaaa

SEQ ID NO: 10294 - protein, 90 aa, Glycine max
  misc_feature: Ceres CLONE ID no. 1618178
  misc_feature: Ceres CDNA ID no. 36706363
  misc_feature (1)..(90): Pfam Name: GASA PFAM Desc: Gibberellin regulated protein
  misc_feature: Homolog of GI Number: 14627134 NR Desc: snakin
  misc_feature: Homolog of GI Number: 66731525 NR Desc: GIR1
  misc_feature: Homolog of GI Number: 28394019 NR Desc: putative gibberellin
  misc_feature: Homolog of GI Number: 3355483 NR Desc: similar to gibberellin
  misc_feature: Homolog of GI Number: 4102634 NR Desc: Snakin
  misc_feature: Homolog of GI Number: 48375076 NR Desc: gibberellin
  misc_feature: Homolog of GI Number: 53793182 NR Desc: putative gibberellin induced protein 3
  misc_feature: Homolog of GI Number: 44681330 NR Desc: At1g74670
  misc_feature: Homolog of GI Number: 26452585 NR Desc: putative gibberellin
MKLVFATLLLCSLLLSSSFLEPVIAYEDSSYCSNKCSDRCSSAGVKDRCLRYCGICCAECKCVPSGTYGNKHQCPCYRDKLNKKGKPKCP

SEQ ID NO: 10295 - DNA, 531 bp, Glycine max
  misc_feature: Ceres CLONE ID no. 1618244
  misc_feature: Ceres CDNA ID no. 29191613
  CDS (42)..(335): REFERENCED BY SEQ ID NO: 10296
cagttgcatcgaagagagagagagcgagagagagagagagaatggcagcacttggtggcaatcgtgatgtggcaggaagccagaacagccttgagatcgatggtttagctcgctttgctgttgaagaacacaacaaaaaacagaatgcccttttggagtttgaaaaggtagtaagtgcaaaacagcaagtggtttctggtaccttgtacaccatcactttggaggcaaaagatggtgggcaaaagaaggtttatgaagccaaagtttgggagaaggcatggttgaacttcaaggaggtgcaagagttcaagcttgttggagatgcacctgcatagtctagtgcttaattaggttgcagaagagtgaagagtgagacagcctggctcgaaggggaaagcctaaggatatatcaaagcatgctatatgtataaaataaatgtagcttttctaccttcggtattgatatttgaaatcgtgatttggcatcttatatatgatctctgtgtttgtctaaaaaaaaaaaaaaaaaaa

SEQ ID NO: 10296 - protein, 97 aa, Glycine max
  misc_feature: Ceres CLONE ID no. 1618244
  misc_feature: Ceres CDNA ID no. 29191613
  misc_feature (5)..(93): Pfam Name: Cystatin PFAM Desc: Cystatin domain
  misc_feature: Homolog of GI Number: 288188 NR Desc: cysteine proteinase inhibitor
  misc_feature: Homolog of GI Number: 1277164 NR Desc: cysteine proteinase inhibitor
  misc_feature: Homolog of GI Number: 74058377 NR Desc: cystatin
  misc_feature: Homolog of GI Number: 4150974 NR Desc: cystatin
  misc_feature: Homolog of GI Number: 18030077 NR Desc: cystatin
  misc_feature: Homolog of GI Number: 15795168 NR Desc: cysteine proteinase inhibitor
  misc_feature: Homolog of GI Number: 24899735 NR Desc: cysteine proteinase inhibitor
  misc_feature: Homolog of GI Number: 21554079 NR Desc: cysteine proteinase inhibitor
  misc_feature: Homolog of GI Number: 11139270 NR Desc: PRLI
  misc_feature: Homolog of GI Number: 52001235 NR Desc: cysteine proteinase inhibitor
  misc_feature: Useful for making plants with altered leaf shape eg curled leaves
MAALGGNRDVAGSQNSLEIDGLARFAVEEHNKKQNALLEFEKVVSAKQQVVSGTLYTITLEAKDGGQKKVYEAKVWEKAWLNFKEVQEFKLVGDAPA

SEQ ID NO: 10297 - DNA, 928 bp, Glycine max
  misc_feature: Ceres CLONE ID no. 1619068
  misc_feature: Ceres CDNA ID no. 25446212
  CDS (87)..(704): REFERENCED BY SEQ ID NO: 10298
acgccgctaactctctctcacactcagtctctgtgtctctctctctttcacacccttcactttactctctctctctgacagctaaaatgcaaggaggaatgagatcatttttgtcacatgggaatgtcattagaaatgctgttctacaacgcgtgcgcatggtgaaccccctgctacagacaattgcctcttcgcggtttgaatctgttacgcctgctcgcattgaggagcatggttttgagagcaccacaatttcagacatcttgaatgataaaggcaagggtgctgatggctcctggctttggtgcaccacagatgatactgtttacgatgctgttaaatcaatgacccaaaacaatgttggagctttggttgttgtgaaatctgacgcgaataaggcaattgcaggaattattactgaaagagattacttaagaaagatcatcgtgcagggaagatcatccaagtctactaaggttggagatattatgactgaagagaacaaacttatcacagtcacccctgataccaaagttctgcaggctatgcaactgatgactgacaatagaatcaggcacatccccgtgattgatgaaaaagggatgattggcatggtgtccattggagatgtggttcgtgctgtggtgcgtgagcaccgacaagaggtcgagcgcttgaatgctttcatacaaggtggttattagataatgatgatgaaaaattctcaagggcactcaagctaatttgaattatgtaataagcttgagtgcttgtaaatatgttatggccacagagccttcttgtttgctttcctgtaatttcagttttatgggcattaacccgatggagtagcagcatgttaataataacaactggatgcagtttgaatttgttttgaatcattttccaaaaaaaaaaaaaaaaaaaa

SEQ ID NO: 10298 - protein, 205 aa, Glycine max
  misc_feature: Ceres CLONE ID no. 1619068
  misc_feature: Ceres CDNA ID no. 25446212
  misc_feature (65)..(187): Pfam Name: CBS PFAM Desc: CBS domain pair
  misc_feature: Homolog of GI Number: 47027028 NR Desc: CBS1
  misc_feature: Homolog of GI Number: 55296028 NR Desc: CBS domain protein
  misc_feature: Homolog of GI Number: 34913008 NR Desc: P0663E10.18
  misc_feature: Homolog of GI Number: 46321816 NR Desc: COG0517: FOG: CBS domain
  misc_feature: Homolog of GI Number: 67666978 NR Desc: CBS
  misc_feature: Homolog of GI Number: 67548342 NR Desc: CBS
  misc_feature: Homolog of GI Number: 46314014 NR Desc: COG0517: FOG: CBS domain
  misc_feature: Homolog of GI Number: 9188545 NR Desc: inosine
  misc_feature: Homolog of GI Number: 62290164 NR Desc: CBS domain protein
MQGGMRSFLSHGNVIRNAVLQRVRMVNPLLQTIASSRFESVTPARIEEHGFESTTISDILNDKGKGADGSWLWCTTDDTVYDAVKSMTQNNVGALVVVKSDANKAIAGIITERDYLRKIIVQGRSSKSTKVGDIMTEENKLITVTPDTKVLQAMQLMTDNRIRHIPVIDEKGMIGMVSIGDVVRAVVREHRQEVERLNAFIQGGY

SEQ ID NO: 10299 - DNA, 967 bp, Glycine max
  misc_feature: Ceres CLONE ID no. 1619180
  misc_feature: Ceres CDNA ID no. 25402496
  CDS (69)..(668): REFERENCED BY SEQ ID NO: 10300
agttctcacaaataaataaaaaaaattgttttcgtgtggaaacaaaaaaacaattcaaaaacaaacatatgatggtgaagccgagtagcgaaaagccagaggagcatagggattccaagtactacaaaggggtccgaaagagaaaatggggcaaatgggtatccgaaataagactacccaacagccgtcagaggatttggttgggatccttcgacacccccgagaaggccgcgcgtgccttcgacgccgcaatgttctgcttacgtggccgcaacgccaagttcaatttccccgacaacccacccgacatcgccggcggggaatccatgacgccgtcacagattcaggtcgccgccgcacaattcgccaacgctgggccccacgagggacattcgggtcgacccgaacattctcccatgcaatctctatcgccttctgtttcagaagggaccgttctaacggacagtgacgtcaccacacttaacggttcgctaacggatttgttcactcccgttgggtcgagtggttacgcatccgattacgggattttccccggtgttgatgatttcagtggcggtttttatgtgccggaaatgctgaactttaattatggagaagaaaacggggaagggttcatagttgatgagtctttcttgtggaatttttgaggggcaatcaaatccagtattaaccggcaaaaccggtcacggttgcggatagttttattgtttccggaaccgtggcaatgacccgggtttggattggttattttttagacgaccaaacctataaccaagaaactatgatatccatgcaactgtagcaccaaaagtaatgcaatttgtccagatagttgtgatttcttttttttaaacaagatatttgtaatttgtaaagctcttataacagatattgtgaaaaaaataatttctgattcattcgataacaaaaaaaaaaaaaaaaaaaa

SEQ ID NO: 10300 - protein, 198 aa, Glycine max
  misc_feature: Ceres CLONE ID no. 1619180
  misc_feature: Ceres CDNA ID no. 25402496
  misc_feature (16)..(79): Pfam Name: AP2 PFAM Desc: AP2 domain
  misc_feature: Homolog of GI Number: 78216290 NR Desc: dehydration
  misc_feature: Homolog of GI Number: 29893536 NR Desc: putative AP2 domain transcription factor
  misc_feature: Homolog of GI Number: 22135860 NR Desc: AP2 domain containing protein
  misc_feature: Homolog of GI Number: 51091816 NR Desc: AP2 domain transcription factor
  misc_feature: Homolog of GI Number: 50946411 NR Desc: AP2 domain transcription factor
  misc_feature: Homolog of GI Number: 50915294 NR Desc: AP2 domain transcription factor
  misc_feature: Homolog of GI Number: 46359851 NR Desc: At4g31060
  misc_feature: Homolog of GI Number: 48479360 NR Desc: putative AP2/EREBP transcription factor
  misc_feature: Homolog of GI Number: 18378818 NR Desc: AP2 domain
  misc_feature: Homolog of GI Number: 25406719 NR Desc: protein Similar to transcription factor TINY
  misc_feature: Useful for delaying flowering time
  misc_feature: Useful for making bigger plants
  misc_feature: Useful for making plants with increased biomass and foliage
  misc_feature: Useful for making plants with increased biomass and foliage
  misc_feature: Useful for making smaller plants
  misc_feature: Useful for sterility
MVKPSSEKPEEHRDSKYYKGVRKRKWGKWVSEIRLPNSRQRIWLGSFDTPEKAARAFDAAMFCLRGRNAKFNFPDNPPDIAGGESMTPSQIQVAAAQFANAGPHEGHSGRPEHSPMQSLSPSVSEGTVLTDSDVTTLNGSLTDLFTPVGSSGYASDYGIFPGVDDFSGGFYVPEMLNFNYGEENGEGFIVDESFLWNF

SEQ ID NO: 10301 - DNA, 693 bp, Glycine max
  misc_feature: Ceres CLONE ID no. 1619315
  misc_feature: Ceres CDNA ID no. 25446214
  CDS (76)..(576): REFERENCED BY SEQ ID NO: 10302
attcacaaatcacaacatatccattgtgtggtataccatgtttgactattagtttaacttgttagaaggagtataatgggtgaacaattggggctgctaaaagtcattgttgtgcaagggaaaaggttggtgatccgggatttcaagaccagtgatccttatgttgtgctcaagctagggaatcagactgcaaagaccaaggtaattaatagctgcttgaatcctgtttggaatgaggagctgaatttcactctgacagaacccttgggagttctgaatttggaagtgtttgataaagatcttctgaaggctgatgacaagatggggaatgctttcctgaaccttcaaccaatagtctctgcagccagattaagagacatcttaagagtgtcctctggtgagacgacattaaggaaggtcatacctgatggtgaaaactgtcttgtccgtgaaagcagtatcaactgtgtgaatggtgaggtggtgcagaatgtttggttaaggcttcgtggagttgagtctggggaactagaattgaccatcaagttgatcacacatgttgctcctgcaatatagtgcaacaattgcatgtgtcataagtgtagatctctaactaacattttatgtctagtcgagtcttgcttttgattaactcctgcatagatgtttctacccaaaaaaaaaaaaaaaaaa

SEQ ID NO: 10302 - protein, 166 aa, Glycine max
  misc_feature: Ceres CLONE ID no. 1619315
  misc_feature: Ceres CDNA ID no. 25446214
  misc_feature (8)..(87): Pfam Name: C2 PFAM Desc: C2 domain
  misc_feature: Homolog of GI Number: 50899010 NR Desc: C2 domain
  misc_feature: Homolog of GI Number: 50931293 NR Desc: putative zinc finger protein
  misc_feature: Homolog of GI Number: 50907613 NR Desc: C2 domain
  misc_feature: Homolog of GI Number: 50904513 NR Desc: putative zinc finger and C2 domain protein
  misc_feature: Homolog of GI Number: 9294500 NR Desc: GTPase activating protein
  misc_feature: Homolog of GI Number: 51091945 NR Desc: putative zinc finger and C2 domain protein
  misc_feature: Homolog of GI Number: 21536965 NR Desc: putative zinc finger and C2 domain protein
  misc_feature: Homolog of GI Number: 50912253 NR Desc: putative zinc finger and C2 domain protein
  misc_feature: Homolog of GI Number: 50905999 NR Desc: putative zinc finger and C2 domain protein
  misc_feature: Homolog of GI Number: 21594052 NR Desc: putative GTPase activating protein
  misc_feature: Utility: PEG Useful for making plants with increased tolerance to drought
MGEQLGLLKVIVVQGKRLVIRDFKTSDPYVVLKLGNQTAKTKVINSCLNPVWNEELNFTLTEPLGVLNLEVFDKDLLKADDKMGNAFLNLQPIVSAARLRDILRVSSGETTLRKVIPDGENCLVRESSINCVNGEVVQNVWLRLRGVESGELELTIKLITHVAPAI

SEQ ID NO: 10303 - DNA, 732 bp, Glycine max
  misc_feature: Ceres CLONE ID no. 1619357
  misc_feature: Ceres CDNA ID no. 25446215
  CDS (62)..(502): REFERENCED BY SEQ ID NO: 10304
agtttttcttctgcactcattctttcattctcattgccgtcacagagagagacaagaaacaatgaagtttaaccctagggtttcctcaagccgtcgcaagagccgcaaggctcacttcaccgctccgtcgagcgtgcgccgcgtcctgatgagcgcgcctctctccaccgatctccggtcaaagtacaacgtgcggtccattccggttcgcaaggacgacgaggttcaggtcgtgaggggaacctacaagggccgcgagggcaaagtggtccaggtctatcgccgcaagtgggtcatccacatcgagcgcatcacccgcgagaaggttaacggctccaccgttaacgttggcattcacccttccaaggttgtcgtcaccaagctccgaatggacaaggaccgcaaatccttgctcgatcggaaggccaagggtcgcgccgccgccgacaaggaaaagggtaccaagttcgctcctgaggatattatgcagaccgtcgattagtttctctcctttttttaccctcgctatactttttatttaccgcatttgttgtcgctattatttggaacttggattcggttatttttagtgtttcttgtgtttttttttatttagtagtttgagggtcttgtggtttggatcttaagggttccgctattgtgaggcctttctgttttgtttaatttaatcaaatgtttgacattattactgctaaaaaaaaaaaaaaaaaa

SEQ ID NO: 10304 - protein, 146 aa, Glycine max
  misc_feature: Ceres CLONE ID no. 1619357
  misc_feature: Ceres CDNA ID no. 25446215
  misc_feature: The plant is abnormally small.
  misc_feature: Useful for making plants with modulated biomass
  misc_feature (49)..(82): Pfam Name: KOW PFAM Desc: KOW motif
  misc_feature: Homolog of GI Number: 64420807 NR Desc: putative L24 ribosomal protein
  misc_feature: Homolog of GI Number: 23397084 NR Desc: putative 60S ribosomal protein
  misc_feature: Homolog of GI Number: 21554514 NR Desc: 60S ribosomal protein L26
  misc_feature: Homolog of GI Number: 62732715 NR Desc: ribosomal protein L24
  misc_feature: Homolog of GI Number: 77553015 NR Desc: ribosomal protein L24
  misc_feature: Homolog of GI Number: 3914740 NR Desc: 60S ribosomal protein L26
  misc_feature: Homolog of GI Number: 34895672 NR Desc: putative ribosomal protein L26
  misc_feature: Homolog of GI Number: 3747050 NR Desc: ribosomal protein L26
  misc_feature: Homolog of GI Number: 62701693 NR Desc: ribosomal protein L24
  misc_feature: Homolog of GI Number: 72159025 NR Desc:  similar to CG6846
  misc_feature: Useful for increasing chlorophyll and photosynthetic capacity
  misc_feature: Useful for making ornamental plants with modified leaves
  misc_feature: Useful for making shorter plants
  misc_feature: Useful for sterility
MKFNPRVSSSRRKSRKAHFTAPSSVRRVLMSAPLSTDLRSKYNVRSIPVRKDDEVQVVRGTYKGREGKVVQVYRRKWVIHIERITREKVNGSTVNVGIHPSKVVVTKLRMDKDRKSLLDRKAKGRAAADKEKGTKFAPEDIMQTVD

SEQ ID NO: 10305 - DNA, 617 bp, Glycine max
  misc_feature: Ceres CLONE ID no. 1619432
  misc_feature: Ceres CDNA ID no. 25447021
  CDS (112)..(384): REFERENCED BY SEQ ID NO: 10306
gagacgaatacgcagtcgttttaaaagctccctctgggcatttccgtcctcgaatagcatcggcagcaccacaacactgtgccctctttctctctttccttcgcagaagccatggcctcatttgcacgtggagccgcatctttaacccgcattggtctttccacttccaagactccccttcaactcatccaccgccgtggcctcgccgatcaccatggccctcccaaagttgcctgctggaaagatccaatgagcccatctaaatggaaggaggagcactttgtgattgtctctttaactggttggggactactcatctatgggggatacaagttggccacaggaggcaagggcaagaaagaagaggaattggcaaaagcataacactgaggtttggagaatattaaaaatacaaagtgttcttggtaataatgctgcgagcgcccagacttttccaagtttttcagactcggtcttgtttgatggcaaacaaatcttttggctagttattcattaatatttgcaaacagtgaatattgggaggttttttttttcagaacaatgtgttacatttaagttttatttgcccgttttacgcaaaaaaaaaaaaaaaaaaa

SEQ ID NO: 10306 - protein, 90 aa, Glycine max
  misc_feature: Ceres CLONE ID no. 1619432
  misc_feature: Ceres CDNA ID no. 25447021
MASFARGAASLTRIGLSTSKTPLQLIHRRGLADHHGPPKVACWKDPMSPSKWKEEHFVIVSLTGWGLLIYGGYKLATGGKGKKEEELAKA

SEQ ID NO: 10307 - DNA, 1007 bp, Glycine max
  misc_feature: Ceres CLONE ID no. 1619543
  misc_feature: Ceres CDNA ID no. 40041505
  CDS (175)..(738): REFERENCED BY SEQ ID NO: 10308
gagaactcttatcattcttttttccacttgacattgccgacgccaccaaatacacaaccttaactttcccacaacactacccatccatcattcgttttctctctagattttttcagttagttattgctgtcttctttttgtgtgtgccaacaacacagaaagagagagaaagacatggctctgaaccaatcaaaggccgtgttgttgagggtgagtttggtggtggtggcgctgtgtatagcaggatacatagtgggtccccctctctactggcatttcgttgcagtgaacaaccactcttcatcttctacttgtgcaccctgcatctgcgattgctcttcacaacccattctttctattccacaaggacttagcaacacttccttcggagattgtgcaaagcctgacccagaagtgagtggagacactgaaaagaattttgctgagctattgacagaagaactcaagcttcaggagagccaagctgtggaaaatcagcaacgtgctgacatggcattgcttgaggcaaaaaagattgcatctcagtatcagaaggaagcagacaagtgtaattcaggaatggaaacgtgcgaggaggctagggagaaggctgagttgacattagtcacgcagaagaagctaactgcattgtgggaacttagagcacgtcagaaagggtggaaggaagggcttgccaaatctcatgcacactctcaagggaaagtacagagttcttagatacgttacacagccacctccatggaggtgagtggttgcataatactacaatagttttcaaatgttggtaatagcaaaagtgagtcatcgaggctcatgtgttcatgaaaggtcaagtgtaaaatgcaaatgttgtatttctgtcattcatttttgggtctttattccatgtgtaacacggtttaaagctagaaatcaccaaatgttgggtaaaacttgcataaaaaatagactgtcttttttgtatcgaaaaaaaaaaaaaaaaaaaa

SEQ ID NO: 10308 - protein, 187 aa, Glycine max
  misc_feature: Ceres CLONE ID no. 1619543
  misc_feature: Ceres CDNA ID no. 40041505
  misc_feature: Homolog of GI Number: 4056420 NR Desc: ESTs gbT144077 and gbT43352 come from this gene.
  misc_feature: Homolog of GI Number: 50926183 NR Desc: OSJNBa0029H02.22
MALNQSKAVLLRVSLVVVALCIAGYIVGPPLYWHFVAVNNHSSSSTCAPCICDCSSQPILSIPQGLSNTSFGDCAKPDPEVSGDTEKNFAELLTEELKLQESQAVENQQRADMALLEAKKIASQYQKEADKCNSGMETCEEAREKAELTLVTQKKLTALWELRARQKGWKEGLAKSHAHSQGKVQSS

SEQ ID NO: 10309 - DNA, 1058 bp, Glycine max
  misc_feature: Ceres CLONE ID no. 1619549
  misc_feature: Ceres CDNA ID no. 40041506
  CDS (135)..(863): REFERENCED BY SEQ ID NO: 10310
aaattgccctaactaaattgcacaataatctcacaactttgaaaaggagatatagcatcgtttgtctctgctctttgattgcagcgtccggcatgtgattgatgtgtgaattttgaggtgctgtgttccgtttgatgaaaatgagtgttatccgagttgctccatgtcttcctggggtttatgctcccccaatcacgtcgtctcagttgcgtcgccgcgattttaactcaacgccaccttcattgccgacggcgtttgaccctatctctgtcacttccctgagcctaaaagccgaaccctcgcctcgcttacattgcctgcatggcctcaaatctcgccaacctctgcacgtttgtttcgccggtggacaagaaatgatggaaaataacggggatttccagagcaaatctcttcagaaagctatgggacaattgaagggatattcgatagaggatatattgcgacagcaaatagaaaagggcggaagtgggggaaagcctccaggaggacgaggtagtggtggtggtggcagcgacaacagctctggtggatcagatgggatgtcaaatgaaactcttcaagttgttttagcatcagtttgctttatattaatgtatatttttgtcatcaatggcttagaacttctaaagctagctaaggactgcatcaagtttgtgtctggtagaggccagagtgttcgattgaagcaagccgtgtacaaatgggtacgaatttacaagaatatcatcgagaagatggaagctgccaggaatgggttggagaaagcctccacttgcttgttggaccatgatttcttccgaggtgtctttaggcataacatgaaatcaaatccagaagaataatttttccgtgtacctattcacataaattttggtttccttctttaggacaaaaagtacattcaatatatatattttttgggtatacattcaatatcattcttcgtttgctgaaatttcaccatttgagaataacaggttaaattaaatcattgcagtttttgcatatattttgttcaaaaaaaaaaaaaaaaaaaa

SEQ ID NO: 10310 - protein, 240 aa, Glycine max
  misc_feature: Ceres CLONE ID no. 1619549
  misc_feature: Ceres CDNA ID no. 40041506
  misc_feature: Homolog of GI Number: 50925823 NR Desc: OSJNBb0091E11.5
MSVIRVAPCLPGVYAPPITSSQLRRRDFNSTPPSLPTAFDPISVTSLSLKAEPSPRLHCLHGLKSRQPLHVCFAGGQEMMENNGDFQSKSLQKAMGQLKGYSIEDILRQQIEKGGSGGKPPGGRGSGGGGSDNSSGGSDGMSNETLQVVLASVCFILMYIFVINGLELLKLAKDCIKFVSGRGQSVRLKQAVYKWVRIYKNIIEKMEAARNGLEKASTCLLDHDFFRGVFRHNMKSNPEE

SEQ ID NO: 10311 - DNA, 933 bp, Glycine max
  misc_feature: Ceres CLONE ID no. 1619565
  misc_feature: Ceres CDNA ID no. 29191701
  CDS (119)..(700): REFERENCED BY SEQ ID NO: 10312
acgtgatctaggatctctctctctaggatctgcttctttctcttatcaattctcattcgtaatcattcattcctccaatctacgactttctgttgtttctccctcaacacaacacaacatgttcctctttgactggttctatggcattctcgcttccctcggtctctggcagaaagaagccaaaattctcttccttggtctcgataatgccggcaaaaccaccctccttcacatgctcaaagacgagagattagttcagcaccagccgacgcagcaccccacttcggaggaattgagcattgggaagatcaagtttaaggctttcgatttggggggccatcaagttgctcgcagggtctggaaagactattatgccaaggtggatgctgtcgtgtacctggttgacgccttcgataaagagaggttcgcggaatctaagaaggagctcgatgccttgctttctgatgaatccttggcaaatgttccatttcttgtgctaggcaacaagattgacatcccttacgcagcttcagaagacgagctacgatatcatctaggcctgaccaatttcaccacaggcaaaggaaagattaacctcacagactccaaccttcgaccccttgaagtgttcatgtgcagcattgtgcgcaagatggggtatggtgaaggcttccagtggctttcccaatacatcaagtagagagtccttattcattcttagttcccctttctcttgtcaactagcactgtctgcagttacatcagaagataatttacctttgtttttgcttttgatgattttttattggattatttgatacaactgcagtgatattacatgataaaatttgtatcttcaaagatttttttgggggaatgttctcctttaaaatactgaattctgttgtagccctaaaaaaaaaaaaaaaaaaa

SEQ ID NO: 10312 - protein, 193 aa, Glycine max
  misc_feature: Ceres CLONE ID no. 1619565
  misc_feature: Ceres CDNA ID no. 29191701
  misc_feature: Homolog of GI Number: 20465729 NR Desc: putative SAR1/GTP
  misc_feature: Homolog of GI Number: 20465533 NR Desc: putative GTP
  misc_feature: Homolog of GI Number: 2108345 NR Desc: small GTP
  misc_feature: Homolog of GI Number: 21436475 NR Desc: putative Sar1 GTP binding protein
  misc_feature: Homolog of GI Number: 3450893 NR Desc: ras
  misc_feature: Homolog of GI Number: 6563322 NR Desc: small GTP
  misc_feature: Homolog of GI Number: 34894960 NR Desc: putative GTP
  misc_feature: Homolog of GI Number: 77416955 NR Desc: NtSar1 protein
  misc_feature: Homolog of GI Number: 76573331 NR Desc: small GTP
  misc_feature: Homolog of GI Number: 1616612 NR Desc: small GTP
MFLFDWFYGILASLGLWQKEAKILFLGLDNAGKTTLLHMLKDERLVQHQPTQHPTSEELSIGKIKFKAFDLGGHQVARRVWKDYYAKVDAVVYLVDAFDKERFAESKKELDALLSDESLANVPFLVLGNKIDIPYAASEDELRYHLGLTNFTTGKGKINLTDSNLRPLEVFMCSIVRKMGYGEGFQWLSQYIK

SEQ ID NO: 10313 - DNA, 519 bp, Glycine max
  misc_feature: Ceres CLONE ID no. 1619655
  misc_feature: Ceres CDNA ID no. 25402499
  CDS (95)..(313): REFERENCED BY SEQ ID NO: 10314
ctcgtttttcctacttcaaaggtttcttcttcgtatttctcgtaaatttctctctcaacctcctcaaaggaaaaaagaaaaggcatatagttatatggataacaaatcaccgagcaaggagtccaaggaggtgacacgagagtcgcttattgctatttctaactctttacctgataagactctggaatcaacttctgccttagagagcaagaaatcagacggggttatgataccaaaccgtgatcaagatgacaagtttaggtctgaactgatttcaatttcttatgctgaatcccctgatgacaaaatctgatctgttcacgtgtaactcctggattattatcgtttgtttgaacttatgtcaatttcttatatgttgtcttagctatcgtacaactgtgtaaatactttcaccggctacatgcttagttcatgtgagatacttggaagttccaagtgtagtacattttcatatgttaaataaacgtagtattttggcctaaaaaaaaaaaaaaaaaa

SEQ ID NO: 10314 - protein, 72 aa, Glycine max
  misc_feature: Ceres CLONE ID no. 1619655
  misc_feature: Ceres CDNA ID no. 25402499
MDNKSPSKESKEVTRESLIAISNSLPDKTLESTSALESKKSDGVMIPNRDQDDKFRSELISISYAESPDDKI

SEQ ID NO: 10315 - DNA, 1016 bp, Glycine max
  misc_feature: Ceres CLONE ID no. 1619683
  misc_feature: Ceres CDNA ID no. 35383483
  CDS (104)..(805): REFERENCED BY SEQ ID NO: 10316
acacttcacctccaaactcaagttcaccaaaagcaaccacaacaagcacttctcttatttcctatcacaccctattacagattcacaagcgcagacacttcaaatggctctggaagctcttcaatcacccagaactgccactccatcgtttagtccctttgaagaaaccaacctcagttacttggagacaccgtggaccaaaggaaagcgttctaagcgtagccgcatggagcagcaactgcaacactcttcatgcaccgaggaagagtacctcgctctctgtctcatcatgctcgctcacggcggcgccggcggtgtccccgccgccaagcctgctgtctccgacaacaattccgcgccgctacccgccgccaaactgagctacaaatgttcggtctgcaacaaagccttctcctcttaccaagcactcggtggacacaaggccagccaccggaagctcggcggcgagcaccactcgacctcctccgccgtgacaacgagttcggcgtcgaacggcggtgctaggacccacgagtgctccatctgccaaaagacgttcccaacaggacaggccttgggaggacacaaacgttgtcactacgaaggcggtaacagcgccgtaaccgcctctgagggagtggggtccactcacacaggaagccaccgcgatttcgatctgaacctcccggcttttccggacttttcaacaaggttcttcgttgatgacgaggttaccagtcctcatccatccaagaaatcccgtctcaatttgaccatacccaagattgaaatccctcaatactgatgatccatagatccaaaaaatattcagtgtttttttcttctttcttttttaaagttatttgagattaatttgttcttgtacatatatagtacttggaccttattcgctagttttagcttttagattgtagtcattgtacttttgacagtggcaattcaattcaattcaattcatttatttatatttgtaagaaaaaaaaaaaaaaaaaaaa

SEQ ID NO: 10316 - protein, 233 aa, Glycine max
  misc_feature: Ceres CLONE ID no. 1619683
  misc_feature: Ceres CDNA ID no. 35383483
  misc_feature (94)..(116): Pfam Name: zf PFAM Desc: Zinc finger
  misc_feature: Homolog of GI Number: 7228329 NR Desc: putative TFIIIA
  misc_feature: Homolog of GI Number: 32441471 NR Desc: zinc finger protein
  misc_feature: Homolog of GI Number: 7488707 NR Desc: probable zinc finger protein SCOF
  misc_feature: Homolog of GI Number: 55734108 NR Desc: zinc finger DNA
  misc_feature: Homolog of GI Number: 71979887 NR Desc: Cys2
  misc_feature: Homolog of GI Number: 33771374 NR Desc: zinc finger protein PIF1
  misc_feature: Homolog of GI Number: 6693033 NR Desc: T22C5.18
  misc_feature: Homolog of GI Number: 17104583 NR Desc: putative salt
  misc_feature: Homolog of GI Number: 439493 NR Desc: zinc
  misc_feature: Homolog of GI Number: 1418323 NR Desc: zinc finger protein
  misc_feature: Useful for delaying flowering time
  misc_feature: Useful for increasing chlorophyll and photosynthetic capacity
  misc_feature: Useful for making bigger plants
  misc_feature: Useful for making plants with altered leaf shape eg curled leaves
  misc_feature: Useful for making plants with increased biomass and foliage
  misc_feature: Useful for making smaller plants
MALEALQSPRTATPSFSPFEETNLSYLETPWTKGKRSKRSRMEQQLQHSSCTEEEYLALCLIMLAHGGAGGVPAAKPAVSDNNSAPLPAAKLSYKCSVCNKAFSSYQALGGHKASHRKLGGEHHSTSSAVTTSSASNGGARTHECSICQKTFPTGQALGGHKRCHYEGGNSAVTASEGVGSTHTGSHRDFDLNLPAFPDFSTRFFVDDEVTSPHPSKKSRLNLTIPKIEIPQY

SEQ ID NO: 10317 - DNA, 871 bp, Glycine max
  misc_feature: Ceres CLONE ID no. 1619700
  misc_feature: Ceres CDNA ID no. 40041507
  CDS (15)..(689): REFERENCED BY SEQ ID NO: 10318
aaaacactctctaaatgacggctctcagaaaagccgtgttctttgtaatcgctcaatgcttcaccttttccgcatatgctgcaaggtttgaaatcacaaaccgatgcacatacactgtctgggctgcgtctgtgcctgttggcggtggcgtgcaattaaacccgggccagtcatggtccgtggacgtgcctgcaggaacgaaaggggcccgcgtttgggcccgaaccggctgcaacttcgacggttcgggccgcggtggatgccagaccggtgactgcgggggtgtcctcgactgcaaagcttacggtgcgcctcccaacaccctggctgaatacggcctgaacgggttcaacaatttggacttcttcgacatctccctcgtcgacggttttaacgtgcccatggactttagtccaacctcgaatggatgcacacgtggcataagctgcactgcggacattaacggacagtgccctagtgagctaaagactcaaggaggttgcaacaacccttgcactgtcttcaaaaccgaccagtactgttgcaattccggtagctgtgggcccactgattattccagattcttcaagcaaaggtgccccgatgcttatagttaccccaaggatgatccaactagcaccttcacttgtaatggtgggactgactatagggttgtcttttgtccttgaacccaataaccttacataatatataatatatgcactaaaataaagatcaataaaattacataaggcgtgtgcactttgcgtgcccctcctcgtctatgatgtgtgtacttctattctaaatgaaatggggtacttatgaataatatattaaactctttgggcaaaaaaaaaaaaaaaaaaaa

SEQ ID NO: 10318 - protein, 224 aa, Glycine max
  misc_feature: Ceres CLONE ID no. 1619700
  misc_feature: Ceres CDNA ID no. 40041507
  misc_feature (29)..(224): Pfam Name: Thaumatin PFAM Desc: Thaumatin family
  misc_feature: Homolog of GI Number: 129320 NR Desc: P21 protein
  misc_feature: Homolog of GI Number: 444321 NR Desc: protein P21
  misc_feature: Homolog of GI Number: 14290147 NR Desc: thaumatin
  misc_feature: Homolog of GI Number: 20385169 NR Desc: pathogenesis
  misc_feature: Homolog of GI Number: 33329390 NR Desc: thaumatin
  misc_feature: Homolog of GI Number: 1839046 NR Desc: osmotin
  misc_feature: Homolog of GI Number: 5881239 NR Desc: thaumatin
  misc_feature: Homolog of GI Number: 71057064 NR Desc: thaumatin
  misc_feature: Homolog of GI Number: 6470277 NR Desc: osmotin
  misc_feature: Homolog of GI Number: 14290151 NR Desc: thaumatin
  misc_feature: Utility: Seed Bleaching Useful for making low fiber seeds with increased digestability
MTALRKAVFFVIAQCFTFSAYAARFEITNRCTYTVWAASVPVGGGVQLNPGQSWSVDVPAGTKGARVWARTGCNFDGSGRGGCQTGDCGGVLDCKAYGAPPNTLAEYGLNGFNNLDFFDISLVDGFNVPMDFSPTSNGCTRGISCTADINGQCPSELKTQGGCNNPCTVFKTDQYCCNSGSCGPTDYSRFFKQRCPDAYSYPKDDPTSTFTCNGGTDYRVVFCP

SEQ ID NO: 10319 - DNA, 506 bp, Glycine max
  misc_feature: Ceres CLONE ID no. 1619713
  misc_feature: Ceres CDNA ID no. 29191614
  CDS (176)..(364): REFERENCED BY SEQ ID NO: 10320
aataaggcccgcccatttactttggatatatctaagcccgcaacccttaccgtaaaaccctagcaatactaatagcaaaaactcattcgcgatctcgttctgtacgtgcagccgcagcaagtgatcgaagcgaaaagagagaaattcatcgtcgcagtaatcatgggtaaggttcatggatcacttgcacgtgctggtaaggttagagggcaaaccccgaaggtggccaagcaggataagaagaagaagccacgtggccgcgcccacaagaggatgcagtacaatcgccgattcgtcaccgccgtggtgggattcggcaagaagaggggacccaactcgtctgagaagtgaggccgaggcttgaggaatatgttgctactctatttgatttatctttgttgttttttatttatttttaatttgtatgttttgattgtgttctgtgaacggtttttgttagctttatatcaaacttgaaattttgcatacaaaaaaaaaaaaaaaaa

SEQ ID NO: 10320 - protein, 62 aa, Glycine max; identical to SEQ ID NO: 38
  misc_feature: Ceres CLONE ID no. 1619713
  misc_feature: Ceres CDNA ID no. 29191614
  misc_feature (3)..(61): Pfam Name: Ribosomal_S30 PFAM Desc: Ribosomal protein S30
  misc_feature: Homolog of GI Number: 55773694 NR Desc: 40S ribosomal protein S30
  misc_feature: Homolog of GI Number: 25295582 NR Desc: 40S ribosomal protein S30
  misc_feature: Homolog of GI Number: 30102786 NR Desc: At5g56670
  misc_feature: Homolog of GI Number: 50603825 NR Desc: MGC89853 protein
  misc_feature: Homolog of GI Number: 47682823 NR Desc: MGC80045 protein
  misc_feature: Homolog of GI Number: 6679753 NR Desc: Finkel
  misc_feature: Homolog of GI Number: 15822932 NR Desc: Finkel
  misc_feature: Homolog of GI Number: 27807419 NR Desc: Finkel
  misc_feature: Homolog of GI Number: 36968262 NR Desc: Finkel

SEQ ID NO: 10321 - DNA, 817 bp, Glycine max
  misc_feature: Ceres CLONE ID no. 1619725
  misc_feature: Ceres CDNA ID no. 29191615
  CDS (95)..(562): REFERENCED BY SEQ ID NO: 10322
agcataagaggtcgaggttattagcctgcctttgtcagtgctttctatttgttcattttgttgttcgaagccaaaaccctagcagccggcgagaatggcagacgttgaggttgatgcggcggcagcggcaggggcagcgcagccgaagaagagaacgttcaagaaattcagcttcaggggcgtggatctggacgcgcttctggacatgtccaccgacgaactggtgaagatgttcagtgcgcgtgcacgtagaaggttccagagaggtctgacgaggaagcccatggccttgattaagaagctccgcaaagctaaaagggaagcaccagcaggtgagaagccagaaccagtgcgcacccatctccgcaacatgattattgtgcctgagatgattggtagcatcattggagtctacaacggcaagactttcaatcaggttgaaatcaaacccgagatgattggccattatctcgctgagttctctatttcatataaacccgtcaagcatggtaggcctggtattggtgccactcactcttccaggttcattcctctcaagtgaaagccttaccgaaactcttgtcagattttctttttatttaagcattttatttttcacttgtctgtctatcatgacttgattccatagtatcaacattttatttagtttttgattttgtcaacttcgataacttgttcattttaagcatgggagatttatgcatcaatatttgtccaagtagtcttttttctacttgggtttgtgaatgcgttaatggatgaatgcaaacttatttagaaaaaaaaaaaaaaaaaa

SEQ ID NO: 10322 - protein, 155 aa, Glycine max
  misc_feature: Ceres CLONE ID no. 1619725
  misc_feature: Ceres CDNA ID no. 29191615
  misc_feature (57)..(138): Pfam Name: Ribosomal_S19 PFAM Desc: Ribosomal protein S19
  misc_feature: Homolog of GI Number: 50934735 NR Desc: putative 40S ribosomal protein S15
  misc_feature: Homolog of GI Number: 50919151 NR Desc: putative 40S ribosomal protein S15
  misc_feature: Homolog of GI Number: 20465567 NR Desc: putative ribosomal protein S15
  misc_feature: Homolog of GI Number: 20147171 NR Desc: At1g04270/F19P19_29
  misc_feature: Homolog of GI Number: 16930761 NR Desc: ribosomal S15 protein
  misc_feature: Homolog of GI Number: 15425963 NR Desc: 40S ribosomal protein S15
  misc_feature: Homolog of GI Number: 2982268 NR Desc: probable 40S ribosomal protein S15
  misc_feature: Homolog of GI Number: 1107485 NR Desc: 40S ribosomal protein S15
  misc_feature: Homolog of GI Number: 79316582 NR Desc: RPS15
  misc_feature: Homolog of GI Number: 82621162 NR Desc: 40S ribosomal protein S15
MADVEVDAAAAAGAAQPKKRTFKKFSFRGVDLDALLDMSTDELVKMFSARARRRFQRGLTRKPMALIKKLRKAKREAPAGEKPEPVRTHLRNMIIVPEMIGSIIGVYNGKTFNQVEIKPEMIGHYLAEFSISYKPVKHGRPGIGATHSSRFIPLK

SEQ ID NO: 10323 - DNA, 638 bp, Glycine max
  misc_feature: Ceres CLONE ID no. 1619783
  misc_feature: Ceres CDNA ID no. 35383484
  CDS (36)..(374): REFERENCED BY SEQ ID NO: 10324
aaatacatctcatttcatttcttttctcacacaacatgtactcaacaaagagcatagctgattcagcatcatggtgttgtgccttggcactattgtgtctaatactattggggtccataagggagaaccatgtgccggaggaggatgaagccaccgcgagagggcggagcaacctctttgaaaggccgtgtgatgagatatatgtggtgggagaaggggagaccctacacaccataagtgacaagtgtggtgacccttttattgttgaacgcgaccctcatattcatgaccctgatgatgttttcccaggccttgtcatcaaaatcacccccacacccacatacaccaatactaagaaattgttcaagaggtagagctcctagtttttgtttttttttttccttcactttttcacttttttgttttcttgtgtatttcattatgtatatggttatggtacatatatatacccagggtatagttgtgaatcatacaagagaagaatatggagttttatttttctttttttcttttcaattttttagaagttgaaagtaatagtgataagcactttctgtttgattttcacaagagaaataaaatgaaaagaatatctcttaaaaaaaaaaaaaaaaaaa

SEQ ID NO: 10324 - protein, 112 aa, Glycine max
  misc_feature: Ceres CLONE ID no. 1619783
  misc_feature: Ceres CDNA ID no. 35383484
  misc_feature (56)..(98): Pfam Name: LysM PFAM Desc: LysM domain
  misc_feature: Homolog of GI Number: 50928087 NR Desc: OSJNBa0019K04.5
  misc_feature: Homolog of GI Number: 27452901 NR Desc: Putative dihydrodipicolinate reductase
  misc_feature: Homolog of GI Number: 45773918 NR Desc: At4g25433
MYSTKSIADSASWCCALALLCLILLGSIRENHVPEEDEATARGRSNLFERPCDEIYVVGEGETLHTISDKCGDPFIVERDPHIHDPDDVFPGLVIKITPTPTYTNTKKLFKR

SEQ ID NO: 10325 - DNA, 705 bp, Glycine max
  misc_feature: Ceres CLONE ID no. 1619800
  misc_feature: Ceres CDNA ID no. 29191702
  CDS (57)..(284): REFERENCED BY SEQ ID NO: 10326
aaacacacttaatttttccacgccttcaatacaccacactcttctagctccttgcaatggctgactcggatcgctcttctagtgaagtttctacacattctactgattcagggaagcgagggtcttccaaagttgaattttctgaagatgaggaaactcttatcatcaggatgtataaactggtaggggagaggtggtctttaattgctggaaggattcctggaagaacagcagaggaaatagagaagtattggacttcaagattctcaggttctagtgaatgaggtgccaagagttctactacgattggtgttcagtctaggatgagcaagaagattttgggtgcaagattagtgtgattttgtgggacataaaaactgaattaaagttggccttattttataggtatttgtatttgtattggctataaaaaaaaaaagtggggcagcaactatagaagctggtttgtgtaatattttccatcttgaaatgttgcctggtgtgatattttccatcttgaaatgttacttggtggttggtcttatctgaattgtacttattgatgttcaccttcgtgtatttttcttattcatttaccattttgggtttttatcttgtgtctgcaatctgtattggaagagtccaactatggaaatgagaattaattagagacagattcagtatgccaaaaaaaaaaaaaaaaaa

SEQ ID NO: 10326 - protein, 75 aa, Glycine max
  misc_feature: Ceres CLONE ID no. 1619800
  misc_feature: Ceres CDNA ID no. 29191702
  misc_feature: Useful for making plants with modulated growth and phenotype characteristics
  misc_feature: The sequence is a functional homolog of  SEQ ID NO 1086 in the  10/374,780 US patent application
  misc_feature: The sequence is a functional homolog of  SEQ ID NO 1087 in the  10/374,780 US patent application
  misc_feature: The sequence is a functional homolog of  SEQ ID NO 1088 in the  10/374,780 US patent application
  misc_feature: The sequence is a functional homolog of  SEQ ID NO 2161 in the  10/666,642 US patent application
  misc_feature: The sequence is a functional homolog of  SEQ ID NO 2163 in the  10/666,642 US patent application
  misc_feature: The sequence is a functional homolog of  SEQ ID NO 2165 in the  10/666,642 US patent application
  misc_feature: The sequence is a functional homolog of  SEQ ID NO 2167 in the  10/666,642 US patent application
  misc_feature: The sequence is a functional homolog of  SEQ ID NO 374 in the  11/435,388 US patent application
  misc_feature: The sequence is a functional homolog of  SEQ ID NO 376 in the  10/714,887 US patent application
  misc_feature: The sequence is a functional homolog of  SEQ ID NO 376 in the  11/435,388 US patent application
  misc_feature: The sequence is a functional homolog of  SEQ ID NO 378 in the  10/714,887 US patent application
  misc_feature: The sequence is a functional homolog of  SEQ ID NO 378 in the  11/435,388 US patent application
  misc_feature: The sequence is a functional homolog of  SEQ ID NO 380 in the  10/714,887 US patent application
  misc_feature: The sequence is a functional homolog of  SEQ ID NO 380 in the  11/435,388 US patent application
  misc_feature: The sequence is a functional homolog of  SEQ ID NO 382 in the  10/714,887 US patent application
  misc_feature (25)..(70): Pfam Name: Myb_DNA PFAM Desc: Myb
  misc_feature: Homolog of GI Number: 25406722 NR Desc: probable MYB family transcription factor
  misc_feature: Homolog of GI Number: 4559383 NR Desc: putative MYB family transcription factor
  misc_feature: Homolog of GI Number: 26516846 NR Desc: TRIPTYCHON
  misc_feature: Homolog of GI Number: 7267603 NR Desc: putative myb
  misc_feature: Homolog of GI Number: 42572793 NR Desc: myb family transcription factor
  misc_feature: Homolog of GI Number: 15082210 NR Desc: transcription factor MYB1
  misc_feature: Homolog of GI Number: 23476295 NR Desc: myb
  misc_feature: Homolog of GI Number: 14269337 NR Desc: myb
  misc_feature: Homolog of GI Number: 14269333 NR Desc: myb
  misc_feature: Homolog of GI Number: 14269343 NR Desc: recombinant myb
MADSDRSSSEVSTHSTDSGKRGSSKVEFSEDEETLIIRMYKLVGERWSLIAGRIPGRTAEEIEKYWTSRFSGSSE

SEQ ID NO: 10327 - DNA, 790 bp, Glycine max
  misc_feature: Ceres CLONE ID no. 1619916
  misc_feature: Ceres CDNA ID no. 25446216
  CDS (115)..(612): REFERENCED BY SEQ ID NO: 10328
aggtatgtgcagttcctcaattagagtttgggcgaggattccaattccataaccattccctgccatgccaccttctctgcttttgctaactttttttttttttttttttgtagaatgggagctgggcgtgaagtctccatctcacttgatggagtgagggacaagaaccttatgcagctcaaaaagctcaatctcgctcttttccctgttcgttacaatgacaaatactataccgatgcactcgcttccggtgaattcaccaaactagcttactatagtgatatttgtgttggagcgattgcgtgccggctggagaagaaagaaggtggggggcaagttcgggtttacatcatgacattaggtgttttagcaccttaccgtggacttggtattggaacaaggcttttgaatcatgttcttgatctttgctccaagcaaaacatttctgaggtttacttgcatgtgcagacaaacaatgaggatgccataaacttctataagaaatttggatttgaaattacagaaacaatccagaactattatacaaacattacaccgcctgactgctatgttctcacgaggtatactgttctaagcacaacgaagaaataacatttcagattttgaggggaagtaatcagagattgttgcattgttttatgggttttgccatggatgtattacactaaggttttttatgtccaatgctagattttaaacagcaaagttagctaaaaaaaaaaaaggaagcacttggagattctcttgctaaaaaaaaaaaaaaaaaaaa

SEQ ID NO: 10328 - protein, 165 aa, Glycine max
  misc_feature: Ceres CLONE ID no. 1619916
  misc_feature: Ceres CDNA ID no. 25446216
  misc_feature (50)..(134): Pfam Name: Acetyltransf_1 PFAM Desc: Acetyltransferase
  misc_feature: Homolog of GI Number: 28416617 NR Desc: At5g11340
  misc_feature: Homolog of GI Number: 53791479 NR Desc: Mak3 protein
  misc_feature: Homolog of GI Number: 49116762 NR Desc: MGC80671 protein
  misc_feature: Homolog of GI Number: 57109540 NR Desc:  similar to Mak3 homolog
  misc_feature: Homolog of GI Number: 55620958 NR Desc:  similar to Mak3 homolog
  misc_feature: Homolog of GI Number: 34785642 NR Desc: Mak3p homolog
  misc_feature: Homolog of GI Number: 74002728 NR Desc:  similar to Mak3 homolog
  misc_feature: Homolog of GI Number: 55242198 NR Desc: ENSANGP00000026145
  misc_feature: Homolog of GI Number: 33416516 NR Desc: Mak3 protein
  misc_feature: Useful for increasing chlorophyll and photosynthetic capacity
  misc_feature: Useful for making plants with increased biomass and foliage
MGAGREVSISLDGVRDKNLMQLKKLNLALFPVRYNDKYYTDALASGEFTKLAYYSDICVGAIACRLEKKEGGGQVRVYIMTLGVLAPYRGLGIGTRLLNHVLDLCSKQNISEVYLHVQTNNEDAINFYKKFGFEITETIQNYYTNITPPDCYVLTRYTVLSTTKK

SEQ ID NO: 10329 - DNA, 1061 bp, Glycine max
  misc_feature: Ceres CLONE ID no. 1619978
  misc_feature: Ceres CDNA ID no. 29191711
  CDS (67)..(894): REFERENCED BY SEQ ID NO: 10330
aatcccgcactgtgcttctcattctcttctaaaaacgccgcagtctcttctctctcagaaaccctaatggcagagcgcggaggtggcgaacgtggcggcgaccgtggcggtttcggacgcggcttcggcgggcgagggcgcggaggcgacaggggccgcggccggcgtagaggtccccgccgcgaggaggaggagaagtgggtcccggtgactaagctgggacgcctggtgaaggaaggaagaatccgaagcctggagcagatctacctccactcgctgcccatcaaagagcaccagatcatcgacacgctggtgggccccaccctgaaggacgaggtgatgaagatcacgccggtccagaagcagacccgggccgggcagagaacccgtttcaaggccttcgtggtcgtcggcgacaacaacggccacgtgggtctaggcgtgaagtgcagcaaggaagtggccaccgcaattcgtggcgcgattattctcgcgaagctttcggttattcccgtgaggaggggttactgggggaacaagattgggaagccccacaccgttccgtgcaaggttaccgggaagtgtgggtccgttaccgttaggatggttcccgcgcctaggggttccgggattgtggcggctagggttcccaagaaggtgctgcagtttgctggtattgatgatgttttcacctcctccaggggatccaccaagacccttggcaacttcgttaaggctacttttgattgcttgatgaaaacctatggattcctgacaccagaattctggaaggagactcgcttctccaaatctccattccaagagtacacagatctattggcaaaaccaacagggaagactctaatcttggaggaggaaagggtggatgcttgatttgctagttttggttttatggatgttttagagacattgttatttacctttgttggttctgtgctttacttttggttttgatagacggtggtatgtctctgtatggattttgattgtttcaagttttaatttaattgactgtagttttgaaaaaaaaaaaaaaaaaa

SEQ ID NO: 10330 - protein, 275 aa, Glycine max
  misc_feature: Ceres CLONE ID no. 1619978
  misc_feature: Ceres CDNA ID no. 29191711
  misc_feature (169)..(242): Pfam Name: Ribosomal_S5_C PFAM Desc: Ribosomal protein S5
  misc_feature (86)..(152): Pfam Name: Ribosomal_S5 PFAM Desc: Ribosomal protein S5
  misc_feature: Homolog of GI Number: 50919281 NR Desc: putative 40S ribosomal protein S2
  misc_feature: Homolog of GI Number: 30017231 NR Desc: At3g57490
  misc_feature: Homolog of GI Number: 50935111 NR Desc: putative 40S ribosomal protein S2
  misc_feature: Homolog of GI Number: 22137092 NR Desc: At2g41840/T11A7.6
  misc_feature: Homolog of GI Number: 62318510 NR Desc: ribosomal protein S2
  misc_feature: Homolog of GI Number: 18181932 NR Desc: ribosomal protein S2
  misc_feature: Homolog of GI Number: 21618011 NR Desc: ribosomal protein S2
  misc_feature: Homolog of GI Number: 21553851 NR Desc: 40S ribosomal protein S2
  misc_feature: Homolog of GI Number: 21539457 NR Desc: ribosomal protein S2
  misc_feature: Homolog of GI Number: 48103127 NR Desc: similar to ENSANGP00000015322
  misc_feature: Useful for increasing chlorophyll and photosynthetic capacity
  misc_feature: Useful for sterility
MAERGGGERGGDRGGFGRGFGGRGRGGDRGRGRRRGPRREEEEKWVPVTKLGRLVKEGRIRSLEQIYLHSLPIKEHQIIDTLVGPTLKDEVMKITPVQKQTRAGQRTRFKAFVVVGDNNGHVGLGVKCSKEVATAIRGAIILAKLSVIPVRRGYWGNKIGKPHTVPCKVTGKCGSVTVRMVPAPRGSGIVAARVPKKVLQFAGIDDVFTSSRGSTKTLGNFVKATFDCLMKTYGFLTPEFWKETRFSKSPFQEYTDLLAKPTGKTLILEEERVDA

SEQ ID NO: 10331 - DNA, 660 bp, Glycine max
  misc_feature: Ceres CLONE ID no. 1620131
  misc_feature: Ceres CDNA ID no. 29191616
  CDS (82)..(453): REFERENCED BY SEQ ID NO: 10332
gctggtccctcttactaacactagggtttacagagaagcgaagaggcgcagccgtagcagtaactcgtggaattgctagcaatggcgaggatcaaggtttacgagctgaggcagaagacgaaggctgatctgttgaatcagctgaaggacctcaaggccgagcttgccttgcttcgtgttgctaaggtcaccggcggtgcacctaacaagctctctaagatcaaggtggtgaggttgaacattgcccaggttttgacggtgatttctcagaagcagaaggccgcgttgagggatgcctacaagaacaagaagtacttgcctctcgatctccgccctaagaagaccagggccattcgcaggaggcttactaagcaccaggcatcattgaagacagagagggagaagaagaaagagttatatttcccactgaggaaatatgctatcaaggtgtaactttagagcaatcttatctgttaattggacatttacctcctttatactcgccaagttttgataaatctcgttttgtagtttaatgttggagttattgctgattggctgtgttaaatttcatgtcttttatatacctggggtttcttgaagctaccaggatttatttatgggtatcgttagtttccgttcaaaaaaaaaaaaaaaaaa

SEQ ID NO: 10332 - protein, 123 aa, Glycine max; identical to SEQ ID NO: 3144
  misc_feature: Ceres CLONE ID no. 1620131
  misc_feature: Ceres CDNA ID no. 29191616
  misc_feature (6)..(64): Pfam Name: Ribosomal_L29 PFAM Desc: Ribosomal L29 protein
  misc_feature: Homolog of GI Number: 6984224 NR Desc: 60S ribosomal protein L35
  misc_feature: Homolog of GI Number: 71535092 NR Desc: putative 60S ribosomal protein L35
  misc_feature: Homolog of GI Number: 62751093 NR Desc: similar to 60S ribosomal protein L35
  misc_feature: Homolog of GI Number: 21592412 NR Desc: putative 60S ribosomal protein L35
  misc_feature: Homolog of GI Number: 17104643 NR Desc: putative 60S ribosomal protein L35
  misc_feature: Homolog of GI Number: 33589770 NR Desc: At5g02610
  misc_feature: Homolog of GI Number: 30102548 NR Desc: At3g55170
  misc_feature: Homolog of GI Number: 50923665 NR Desc: OSJNBb0006N15.8
  misc_feature: Homolog of GI Number: 51979244 NR Desc: PREDICTED OJ1126_B06.24 gene product
  misc_feature: Useful for sterility

SEQ ID NO: 10333 - DNA, 438 bp, Glycine max
  misc_feature: Ceres CLONE ID no. 1620163
  misc_feature: Ceres CDNA ID no. 36707443
  CDS (86)..(211): REFERENCED BY SEQ ID NO: 10334
gtcacacagctattcctcttaagcttgctactgagtttccacactgcataccttaggtcttccgaattcgaagttaatttgcaagatggctaaggaaaaggctcagatcaacattgtggtggttggtcatgtggaccctgaggaggcaaccaccattaacgagctgaagaagcctgttgtggagaaagaagctccagggcatgccatatgagggcatgcacgtacggcctcggaggggaaccagaaaattatgttaacaaaataatctggaaccctaatgtatcagtgtcatcatcagtgtgtagtttaagctagctttgctatggttacgttctttgagatgagagtcttgatgaacagtaccattctgatgtattgctttccttgaacgttaatgcatgcttcttatcttctgtctaaaaaaaaaaaaaaaaaaaa

SEQ ID NO: 10334 - protein, 41 aa, Glycine max; identical to SEQ ID NO: 1944
  misc_feature: Ceres CLONE ID no. 1620163
  misc_feature: Ceres CDNA ID no. 36707443
  misc_feature: Homolog of GI Number: 83286887 NR Desc: auxin down
  misc_feature: Homolog of GI Number: 485513 NR Desc: ADR12

SEQ ID NO: 10335 - DNA, 1427 bp, Glycine max
  misc_feature: Ceres CLONE ID no. 1621236
  misc_feature: Ceres CDNA ID no. 29191792
  CDS (242)..(1006): REFERENCED BY SEQ ID NO: 10336
aactcgaatctactccatcttccaccttcctccttcctcacccccacacaatatcctcaccccttcgctcattttttctttttattattaaaactaaaattatactagtatataaacctatgctcattccactctttatcttttcctccaatacctccgccaccactctctctctctctctctctctctcttcaatactcacgctagattatttccctttgatgagtgttgaacggccaagatggtgaacgacgacgagtgggtgcgtgcggcgatggaggatgacaccgttgtggtggagcttctgctacgcctcaagcaaggtaccgttttacacaaatctcaccaccagcagcttttacctttctcctggggagtcaaacagccgcgctcaagatcaaggctaacctccgccgccgtctcccgatgcgacgccgccgtttccaccagatgcagccccaccacgcccctctcttggagcgccggcgccgacagttacgaagactccagccgccaccaccaccatcacgccgccgtatccaaggctactgctacaagtggatacactggcaactctgcttctaccaagaggtgcagaagaaaaaagacctttgcagaattaaaggaagaggagagctccctgctaaaggaaagcatatatctgaaaaaggaaatagcgtctgtaaatgcaaactttgaggcacagagagctaaaaatgagagtctgaagagaatgaagcttgatgtgggatcaaaatatcagaacaatccaagttcaacatctgttgaaccgcagcgtctgcctgctggtcaaccccatcagagaatagtggtatctacggaggccctcatacgtcccattcaagaagatactcattcacttgcatcagaatctaggccaaacaggataaaatcaaccggggaaagttttttcttgataccagatctaaatatggtgccgtccgaggatgtttcttgcactgacgctctatgtggaatgagttgagacctctttctcttactatgtgtgttggggatacaaatctgaacaatgtacaggcccagagagctatttgaaggctctatccaatagaaaaccaatgaatatcgtggtgcactagaaacgtttcttgatctgactactaattcttatgaatggaaaagaaattggtagtcatatatatgggaaaattttcttgggtagttctagccattaggctgtagagtagagagatatgctaaaaagttcgcaggttcctccgattccgaaattcttaaaaacctttccgatttcggaattcgtcaatcatgtcagatgtaccaattcttttgtaggttaaacgctcttggattcccttagaaggtatctaaaatctaaaatcaatatacaattttatatttttattcaaaaaaaaaaaaaaaaaaaa

SEQ ID NO: 10336 - protein, 254 aa, Glycine max
  misc_feature: Ceres CLONE ID no. 1621236
  misc_feature: Ceres CDNA ID no. 29191792
  misc_feature: Homolog of GI Number: 48310380 NR Desc: At1g15800
MVNDDEWVRAAMEDDTVVVELLLRLKQGTVLHKSHHQQLLPFSWGVKQPRSRSRLTSAAVSRCDAAVSTRCSPTTPLSWSAGADSYEDSSRHHHHHAAVSKATATSGYTGNSASTKRCRRKKTFAELKEEESSLLKESIYLKKEIASVNANFEAQRAKNESLKRMKLDVGSKYQNNPSSTSVEPQRLPAGQPHQRIVVSTEALIRPIQEDTHSLASESRPNRIKSTGESFFLIPDLNMVPSEDVSCTDALCGMS

SEQ ID NO: 10337 - DNA, 1260 bp, Glycine max
  misc_feature: Ceres CLONE ID no. 1621281
  misc_feature: Ceres CDNA ID no. 40041508
  CDS (80)..(1075): REFERENCED BY SEQ ID NO: 10338
aatttcttcattctcgtgcaacatatcacaaaacccttaagccgatattcaccttcaacgcctctgtagtttgttaaagatggaggctgagaaacagcaccagtttgatgtggacctcggcaacctcatggctttcgattcctatcacaccttcccttcccaaccacctctttccagggaagacctcaccaggcagtgtttactgaaaggcactcacttggttcaagctatcgcagatgccctctttaccttaccatcaatcgaagatgtagatggaccccttgtcaccttgcctcccccaacaactaaattgccaagagaaaaacatctgccaaaaccaaaacctcctactaaatgggaagcttttgccaaaaagaaaggcatacagaaacggaagaaagacaagattgtatatgatgaacagtctggaacctggaaacgcagacatggatatgatcgtgcaaatgatgaagatgctattcctatcattgaggcaaaaccaactgatgatccagaggaggatccttttgccaaaagaaaagaaaataagaagaatagaattgaaaaacaggagaaaaatcgattacagaacttgaaagaagctgcaaaatttggtgctttaccaagccatattcagttggctgctacagctttgcctataacaggaactcaagcagcacccaagaaagttacaaaggatgaactaggtaatgtagcaggaattgcagcaactgcaacagctagtggggggaaatttgacaagaaattggcaggtgaaaagcctcagaaacatgaaggaaaatatcggaagtttctgccagtagtggaaggaaccgggataggatcactggagagggagcaaactgagaaaatattgaacaagatcatctccaagaattctcataacatactgaacgttgaaaaggctgtcacaatgcacaatgtgaagaaagagaagaaacgaaggagcgagaaagggaaggctttagcttcagcaactgacaagaaattgaaaactcaaaaaaagtcttttaaaaagggagattccaagaaaggcaaggccaaaggaaaataatttagattttacaaaaaaagttttgtggggttcttggaaactctatttactggtttcatgttttgtagacgataatttcattttatcatgtatcaatcgtcatccatttttatttgtcatctatatatatttaattcagctctattaattgacaatttttttttgagaaaaaaaaaaaaaaaaaa

SEQ ID NO: 10338 - protein, 331 aa, Glycine max
  misc_feature: Ceres CLONE ID no. 1621281
  misc_feature: Ceres CDNA ID no. 40041508
  misc_feature (1)..(176): Pfam Name: RRS1 PFAM Desc: Ribosome biogenesis regulatory protein
  misc_feature: Homolog of GI Number: 50929779 NR Desc: OSJNBa0088H09.13
  misc_feature: Homolog of GI Number: 18404610 NR Desc: ribosome biogenesis regulatory protein
  misc_feature: Homolog of GI Number: 68404249 NR Desc:  similar to Ribosome biogenesis regulatory protein homolog
  misc_feature: Homolog of GI Number: 55775388 NR Desc: serine protease
  misc_feature: Homolog of GI Number: 41056045 NR Desc: Ribosome biogenesis regulatory protein homolog
  misc_feature: Homolog of GI Number: 76634506 NR Desc:  similar to homolog of yeast ribosome biogenesis regulatory protein RRS1
  misc_feature: Homolog of GI Number: 62648555 NR Desc:  similar to mKIAA0112 protein
  misc_feature: Homolog of GI Number: 55246024 NR Desc: ENSANGP00000013294
  misc_feature: Useful for increasing chlorophyll and photosynthetic capacity
  misc_feature: Useful for making shorter plants and plants with modified flowers
  misc_feature: Useful for making stronger plants
MEAEKQHQFDVDLGNLMAFDSYHTFPSQPPLSREDLTRQCLLKGTHLVQAIADALFTLPSIEDVDGPLVTLPPPTTKLPREKHLPKPKPPTKWEAFAKKKGIQKRKKDKIVYDEQSGTWKRRHGYDRANDEDAIPIIEAKPTDDPEEDPFAKRKENKKNRIEKQEKNRLQNLKEAAKFGALPSHIQLAATALPITGTQAAPKKVTKDELGNVAGIAATATASGGKFDKKLAGEKPQKHEGKYRKFLPVVEGTGIGSLEREQTEKILNKIISKNSHNILNVEKAVTMHNVKKEKKRRSEKGKALASATDKKLKTQKKSFKKGDSKKGKAKGK

SEQ ID NO: 10339 - DNA, 1456 bp, Glycine max
  misc_feature: Ceres CLONE ID no. 1621286
  misc_feature: Ceres CDNA ID no. 25447168
  CDS (91)..(1137): REFERENCED BY SEQ ID NO: 10340
atcatctctctctcgccaaaagtcagcgccttcttttgtcttttctctctctcaaaaaaattccacacactgcagagtttttgtctctctatggcggaagattgggatctacatgcggtggttagaggctactccaccgttacatcatcgtcggtgtcttcctcatcttcttcttcctctggctttgcctcttgttacttccaccctgaagctgctgcttcttcttcttcctcttccggcttcaacatcttcaagggtgaacaaggaataagccaagctttgtcgctttctgcgtacccttttgaggcaaggagctccattgaggagttgcatgagctttgcaagcctttcttctctaaatctcagcctctaacgttgcaggcctcttcacccttgtcctcactctcttcctattcctctgctccacccaagtctgtttcaacgcaagagaaacaacaacagaggagtaagcagccacatgctgtcaccaccccacgatctaaaagaagaaagaaccagcttaagaaagtttgtcaagtaccagttgagaatctctcttcagacatatgggcatggaggaaatatggccagaaacccataaaggggtctccatatccaagggggtactatagatgtagcagctcaaaggggtgtttggcaaggaaacaggttgaaagaaacagatcagacccaacaatgttcatagtgacttacactgctgagcacaaccaccctgcacctactcacagaaactctcttgctggttccacacgccagaagccattggcacctcaaacagccaccaccactgaagaagactctgaaaagagcaagagcttcacaaaacccacttcccctgccacctcaggggcagaggaagaggctccaacaccaccacaaggggaaaaatctgagagcagagaagagaaagaggatgtgatggatgacgaggaaggagatgaatttggcttgtctgatatggtgctttcagatgacttctttgaaagtttggatgagctgagccaactcactgctccttctgttgtcactggagactgcttcagtgaccccttttctgcaattgcaatcccttcttgggtggctagtggtgctgctactgctggtggatgtagatgattcttttgggggaaggaaatcatcacaatgcttttcattgatgacaatatggaccttttatttatttattgtttgtagagggaatgaaacattttggaggaatctttactaacaatggtttgtgaattggaggaaaagttttccttagtagagtagtagtgactagtaaggtagatcaatcaaagcattaatcttgttaaaaatgaatgattattattaggcattcatagttttattatttatgtcatcatacctatgtgttaatgtaaaacaatttattttagtaagttttttgtatgccaaaaaaaaaaaaaaaaaa

SEQ ID NO: 10340 - protein, 348 aa, Glycine max
  misc_feature: Ceres CLONE ID no. 1621286
  misc_feature: Ceres CDNA ID no. 25447168
  misc_feature (156)..(216): Pfam Name: WRKY PFAM Desc: WRKY DNA
  misc_feature: Homolog of GI Number: 27817203 NR Desc: WRKY transcription factor 22
  misc_feature: Homolog of GI Number: 19310809 NR Desc: putative DNA
  misc_feature: Homolog of GI Number: 46394332 NR Desc: TPA: WRKY transcription factor 39
  misc_feature: Homolog of GI Number: 50251953 NR Desc: putative WRKY transcription factor
  misc_feature: Homolog of GI Number: 3033379 NR Desc: putative WRKY
  misc_feature: Homolog of GI Number: 30102716 NR Desc: At1g30650
  misc_feature: Homolog of GI Number: 15990586 NR Desc: WRKY transcription factor 14
  misc_feature: Homolog of GI Number: 37537178 NR Desc: putative DNA
  misc_feature: Homolog of GI Number: 21553615 NR Desc: putative DNA
  misc_feature: Homolog of GI Number: 54290337 NR Desc: DNA
MAEDWDLHAVVRGYSTVTSSSVSSSSSSSSGFASCYFHPEAAASSSSSSGFNIFKGEQGISQALSLSAYPFEARSSIEELHELCKPFFSKSQPLTLQASSPLSSLSSYSSAPPKSVSTQEKQQQRSKQPHAVTTPRSKRRKNQLKKVCQVPVENLSSDIWAWRKYGQKPIKGSPYPRGYYRCSSSKGCLARKQVERNRSDPTMFIVTYTAEHNHPAPTHRNSLAGSTRQKPLAPQTATTTEEDSEKSKSFTKPTSPATSGAEEEAPTPPQGEKSESREEKEDVMDDEEGDEFGLSDMVLSDDFFESLDELSQLTAPSVVTGDCFSDPFSAIAIPSWVASGAATAGGCR

SEQ ID NO: 10341 - DNA, 1334 bp, Glycine max
  misc_feature: Ceres CLONE ID no. 1621300
  misc_feature: Ceres CDNA ID no. 25447169
  CDS (240)..(860): REFERENCED BY SEQ ID NO: 10342
ataaataattagctctggtgagtggcaatggaatccagaaacttgggcagactgggcatagcatccacgctttaatcgaccactgcttcttctacttttctttcctcaagttgttatcgtccgccattcactcctcttttacatttttagggttttaactttctttcacttctttttttataataatttgctccactgctagggttttggcgggagtcgtcgtcgtcattgaatcagccatgcctcggtactactgtgactactgcgacacctatttgacccacgattctccatctgttagaaagcagcacaatgcaggttacaaacacaaggcaaatgtgaggacctactaccagcaatttgaagaacaacaaacacaaagtttaattgatcaaaggatcaaagaacatcttgggcaagctgcagcgtttcagcaggttggtgtggcttataatcatctaatggttcagaggcctaaccttcctcctgtattgccaccaccaagattgcctattcctggaaatgcacaaatacctggaagccaaccactaatgccagggatgagaccacctgtctttcctagacctcctggtgcaccaggatatgtttctgcacctaccatgcctccaatgttacctccacctggtgctccccaggcaccaggtcaactaaataccataccaaggcccccttcattagctccccctccagcagttcctggaagcactgctgctccagcttccaatggtgctccctctatggtatcatcagcaatgtatcaagccaatcctccggcaccatcatctggaagttatgataattacaatgccagtgctcaagcacctgagggtaatcactgacctggttgaactggtcactctgcataatcttatctccattagagtcttatggctagagctatttgtgctctccctaccagctgttcatcaaattaggactctccatttgtgatcatatatagagtaatcattggtatgtagcatgtccagcagcttgaatgcaagaaattttttatgtgttatgtttttggtcccagatgacagatttatatctaagtgccaattactagaacttttttattttgacatgacttgctgatgataggttctattctgcaattaatttgtttttaatctgagttttattagtgataaatgtagatttgggaaaaaaaatcataatttcatatcatgtgttattggatttgagttccctaacaaaagcattgcatgtttaatcaagaacaaaagtgcattgatgtcttgatttcaaattatgtattttgatattgttgtaaaaaaaaaaaaaaaaaa

SEQ ID NO: 10342 - protein, 206 aa, Glycine max
  misc_feature: Ceres CLONE ID no. 1621300
  misc_feature: Ceres CDNA ID no. 25447169
  misc_feature (1)..(38): Pfam Name: zf PFAM Desc: U1 zinc finger
  misc_feature: Homolog of GI Number: 62751087 NR Desc: similar to u1 small nuclear ribonucleoprotein C
  misc_feature: Homolog of GI Number: 50251962 NR Desc: putative u1 small nuclear ribonucleoprotein C
  misc_feature: Homolog of GI Number: 18412147 NR Desc: proline
  misc_feature: Homolog of GI Number: 28466929 NR Desc: At4g03120
  misc_feature: Homolog of GI Number: 7270182 NR Desc: putative C
  misc_feature: Homolog of GI Number: 57229021 NR Desc: U1 small nuclear ribonucleoprotein
  misc_feature: Homolog of GI Number: 57094430 NR Desc:  similar to U1 snRNP
  misc_feature: Homolog of GI Number: 73972600 NR Desc:  similar to U1 small nuclear ribonucleoprotein C
  misc_feature: Homolog of GI Number: 34852241 NR Desc: similar to U1 snRNP
  misc_feature: Homolog of GI Number: 62665709 NR Desc:  similar to U1 snRNP
MPRYYCDYCDTYLTHDSPSVRKQHNAGYKHKANVRTYYQQFEEQQTQSLIDQRIKEHLGQAAAFQQVGVAYNHLMVQRPNLPPVLPPPRLPIPGNAQIPGSQPLMPGMRPPVFPRPPGAPGYVSAPTMPPMLPPPGAPQAPGQLNTIPRPPSLAPPPAVPGSTAAPASNGAPSMVSSAMYQANPPAPSSGSYDNYNASAQAPEGNH

SEQ ID NO: 10343 - DNA, 1560 bp, Glycine max
  misc_feature: Ceres CLONE ID no. 1621315
  misc_feature: Ceres CDNA ID no. 25891403
  CDS (179)..(1285): REFERENCED BY SEQ ID NO: 10344
cagacaataacagagaaaggtccaccaactgagccggtgacggagtttcaccagcctccaatcacattccgccacgtcatccgcccttcctcagccctctccccacgtgtcgacggtcaccgtcaactcacctcttccgtcaaacgaaacccgaaaaaagatcggcggcgaggaggatatggacgacgacgacgagatccagtcgcatccttcgccggcgagcggatcccctccgtcgtcgccgagggcgaacggtcggataacggtgacggtcgcggctccggcgccgccaccaccgccgaacagtctggcattagcgcttccgattcagcagccggcgaagggaaacggcggaggaggaggcggcggcggcggaagggaggattgctggagcgaaggtgcgacggcggtgctgatcgacgcgtggggagagaggtatctggaactgagcagaggaaatctgaagcagaagcactggaaggaggtggcggatatcgtgagcgtcagagaggattacacgaaggcgccgaagaccgatatccagtgcaaaaaccggatcgacaccgttaagaagaagtacaaatcggagaaggcgaagatcgccgccggcgccaccagcaagtggccgttctatgaccgactggaacaattaatcggtccaagcgccaagatccccggcgtcggcggtgcctccggcaccagcgctgccggaaacagtaatttacaaccgcagaaagttccgttaggaattccggtcggcgttcgcggcggcgcgaatcagtttaaccatcctcataaacagccacaaccggttccgttgaagaaccagaagattcagttccggcgccgcggtcctccggtggagtccgattcggaggagcgagacgcgtcgtcgccggcgtcgagcgacagttttccgccggagagtttcgagaggaagaggccgcggttgatgagttcaaacaccacgaaaggaagcggagaaagacggaaggcgaagggttggggaagcgcggtgagggaactgacgcaggcgattctgaaattcggcgaggcgtatgaacaagcggagagttcgaagctgcagcaggtggtggagatggagaagcagaggatgaaattcgcaaaggatttggagttgcagagagtgcagtttttcatgaagacccaggtagagatttcgcagctcaaacttggaagaaaaggtggtaaccctagcaacaaccaccatggcaccaccaacaataacaacagcaatcataacaataatagtggcagtgaatgaccgagggagggataactaggttaaggtagattcgaattgcattagctttgtggtgtatgagtttagttgtttattattattattattatcccttaattgttgcagttaacttaagagggattgctatgctgaaccctcaacaaaaatgaagtgtgctgaatagtgaataatctaatctctttgcagcaaatgtatcagttgtcatgtgtgacaccattctaagttatatcagtatgagggggatcatattgtcattcaaaaaaaaaaaaaaaaaa

SEQ ID NO: 10344 - protein, 368 aa, Glycine max
  misc_feature: Ceres CLONE ID no. 1621315
  misc_feature: Ceres CDNA ID no. 25891403
  misc_feature: Homolog of GI Number: 50924578 NR Desc: OSJNBa0027P08.13
  misc_feature: Homolog of GI Number: 50909591 NR Desc: putative 6b
  misc_feature: Homolog of GI Number: 34910652 NR Desc: P0480C01.17
  misc_feature: Homolog of GI Number: 38347591 NR Desc: OSJNBa0042I15.4
  misc_feature: Homolog of GI Number: 6143873 NR Desc: putative uridylate kinase
  misc_feature: Homolog of GI Number: 21464551 NR Desc: AT3g10030/T22K18_15
  misc_feature: Homolog of GI Number: 50947001 NR Desc: proline
MDDDDEIQSHPSPASGSPPSSPRANGRITVTVAAPAPPPPPNSLALALPIQQPAKGNGGGGGGGGGREDCWSEGATAVLIDAWGERYLELSRGNLKQKHWKEVADIVSVREDYTKAPKTDIQCKNRIDTVKKKYKSEKAKIAAGATSKWPFYDRLEQLIGPSAKIPGVGGASGTSAAGNSNLQPQKVPLGIPVGVRGGANQFNHPHKQPQPVPLKNQKIQFRRRGPPVESDSEERDASSPASSDSFPPESFERKRPRLMSSNTTKGSGERRKAKGWGSAVRELTQAILKFGEAYEQAESSKLQQVVEMEKQRMKFAKDLELQRVQFFMKTQVEISQLKLGRKGGNPSNNHHGTTNNNNSNHNNNSGSE

SEQ ID NO: 10345 - DNA, 1289 bp, Glycine max
  misc_feature: Ceres CLONE ID no. 1621498
  misc_feature: Ceres CDNA ID no. 25447170
  CDS (301)..(1101): REFERENCED BY SEQ ID NO: 10346
gaaaaaaactcggaagctgcatggctgcgttcgttccttggtgttggtggaatctctctctctgactatgctgtgtctctttcccaggaccgcgcgaaacacgtaaatccccttcaaacacaacacaaaaacgcagtgtttccaccatctctatctctatctctatatataccctcacaaccaaacaatccccattccctctctaaccctatctaatctgtcttctcttacattcctttctccaccacacattcaattttaaacctctgggcgtggctagcttcaacctttaacattaacatggccattccctacccccatttcatcgccaccgagaaagccgccatggacgccggcctcctccacccctcctccccctccgtcatcctcacccaagacgatttgaagaaaatcgccgcctacaaggccgtcgagtacgtggagtccggcatggtcctcggcctaggcaccggctccaccgccaagcatgccgtcgaccgcatcggcgagctcctccgccagggcaagctcaaggacatcgtcggaatccccacctccacaaaaacccacgaacaagccctctccctcgggatccccctctccgatctcgacgcccaccccgccatcgatctcgccatcgacggcgccgacgaggtcgaccccttcctcaacctcgtcaagggccgtggcggctccctcctccgagaaaaaatggtcgaaggcgcatgcaagaagttcatcgtcatcgttgatgagtccaagctcgtaaactatttggggggtagtgggttggccatgcccgttgaggttattaagttctgttggaggttcaccgcggcgaggttgcagaagctttttgaggaggctgggtgcgttgccaggctcagaacttttggggagaaggagaaggaggagccttatgtgacggataatgggaactttattgtggatttgtatttcgagaggagtattggggatttgaaggctgctagtgatgctattttgcagcttgctggggttgtggagcatggcatgtttcttgatatggctaccactgttattgttgcaggggagctcgggttgacggtcaagaacaagtagttgttgttggtggttaggagaatgaaggtaggttaattggccaaggttgacatggggtttctaagttctatctaacccatttgtatggtgtagtagtaaaaaaggttttaatccaggggtaaagggggattttgattaaatccttttgttattcaatacagttgttggagaaaaaaaaaaaaaaaaaa

SEQ ID NO: 10346 - protein, 266 aa, Glycine max
  misc_feature: Ceres CLONE ID no. 1621498
  misc_feature: Ceres CDNA ID no. 25447170
  misc_feature (80)..(262): Pfam Name: Rib_5 PFAM Desc: Ribose 5
  misc_feature: Homolog of GI Number: 4262236 NR Desc: putative ribose 5
  misc_feature: Homolog of GI Number: 21592672 NR Desc: putative ribose 5
  misc_feature: Homolog of GI Number: 23297110 NR Desc: putative ribose 5
  misc_feature: Homolog of GI Number: 13430836 NR Desc: putative ribose 5
  misc_feature: Homolog of GI Number: 18654317 NR Desc: ribose
  misc_feature: Homolog of GI Number: 50934599 NR Desc: putative ribose
  misc_feature: Homolog of GI Number: 50934597 NR Desc: putative ribose
  misc_feature: Homolog of GI Number: 21594002 NR Desc: putative ribose 5
  misc_feature: Homolog of GI Number: 6175179 NR Desc: putative ribose 5
  misc_feature: Homolog of GI Number: 50922741 NR Desc: OSJNBa0023J03.8
  misc_feature: Useful for making plants with increased biomass and foliage
  misc_feature: Useful for making plants with increased biomass and foliage
MAIPYPHFIATEKAAMDAGLLHPSSPSVILTQDDLKKIAAYKAVEYVESGMVLGLGTGSTAKHAVDRIGELLRQGKLKDIVGIPTSTKTHEQALSLGIPLSDLDAHPAIDLAIDGADEVDPFLNLVKGRGGSLLREKMVEGACKKFIVIVDESKLVNYLGGSGLAMPVEVIKFCWRFTAARLQKLFEEAGCVARLRTFGEKEKEEPYVTDNGNFIVDLYFERSIGDLKAASDAILQLAGVVEHGMFLDMATTVIVAGELGLTVKNK

SEQ ID NO: 10347 - DNA, 1077 bp, Zea mays
  misc_feature: Ceres CLONE ID no. 1621994
  misc_feature: Ceres CDNA ID no. 25446262
  CDS (86)..(349): REFERENCED BY SEQ ID NO: 10348
tttcgcgggctctttgacgtgcgcgtgtcgacgcgtgcccgtgcttcggacgtgaattttcttcgattcaacagagaccttcgtcatgtccgtggtccgcccttccctgtccgactcagatccacaccatcacccatctagattcccgcaccgtccctccctccacgccgctgcatcctcctcccgacctcgacgatgtcgccaatgctgggtcgtgttcgcgcgcgccatcgcctccacgtcccgtcgccagcagcagcgttgctcaccggcgagtgcctcattgtcttccacttcgcggcccatgtggcgctcgcggcctcggcacacctcgctgcgtcacttttgattctcgtggcggccggccgaccgccctcgtcgtcgagctctcctaggacggctctggctttgcgccgcttcgtcgcttcggggccaggtagaaagtgatttaaatctgagaagagctctctgctagaaagtgatttaaatctgaaaagaagtaagagctctctgctttcctcttctatcaagctattttttctattttcggtaattgactgcacaagctgttgtgggagcaaactcaaatatattttaacagctctttgcttcactcacggtgcaagtcagggcatagctcctgcaaactattctatctcagcaccattttttttcttatatacaacttgtgtttagtaacttgtattctgcggtggtttttgacaatcgaagttttccctggtaaaagtgcatttcctgtagtttgagttggttaaacttattcctaataattgtttttttcttattaatgattgttttttcttgccaggaacatctatggttgtctagagttggcagtggccttttcattcatggttgcctgcactcatcctcggagggttgcagcaatgtcggtctccaggtgtgtggcagaggagatggatgctactattagggaaaacgtgtgtagcggtcatgttaattttaggtatatttttagcagcaacatgttatacaatgtataagttctagcaagtaccactgcaaatgaagattcaaaaaaaaaaaaaaaaaaaa

SEQ ID NO: 10348 - protein, 83 aa, Zea mays
  misc_feature: Ceres CLONE ID no. 1621994
  misc_feature: Ceres CDNA ID no. 25446262
MSPMLGRVRARHRLHVPSPAAALLTGECLIVFHFAAHVALAASAHLAASLLILVAAGRPPSSSSSPRTALALRRFVASGPGRK

SEQ ID NO: 10349 - DNA, 1130 bp, Zea mays
  misc_feature: Ceres CLONE ID no. 1622891
  misc_feature: Ceres CDNA ID no. 25446579
  CDS (143)..(775): REFERENCED BY SEQ ID NO: 10350
aaaaaaggcctagatatggttttcggatacttgaaagcccatcttactctccttccggtcgcgggtcgccgcagtaaacccctaggaagaaaccccaccgcttctggccgccgccggctcaccggtgacggcatccaaatccatggcctcccgccaggcgctccacatcttcacgccctcccggcgggcgatgcacatcctcacgtcgtcccgcggcatcgcctcgaccccgcacctctcgtccttcggctggtttgataagatcaagtccaccatcactggcaagaagcccgaggaggcctccgaggcatcctccttcaccctcacccagttcgcagacacgatggagaaagcgaggaagctggggacgttcaagaacttcgttgccgggcgggccagcgaggccaccgtcgtgaacgtcttcgagaagcactccgctgtgctgcgctacctcggtgccatcgaccccaccggcgagaacctccgaaacactgacaaaattaacgcgaccaagcactgcaactgcacaattgctgacgtggagcacattctggccaagtacacatgggctaaagaggctcagaagaagattgcaaagctcaaggaagaagggaagccattaccgaagtcatttaacgaggtccaaaatctaatgggttctacaccagtagatgtcggcagaagtaatctggcaaagagtggtcagataagtaggaatgctttctgcccatgtggttctaagaaacgatataaaaggtgctgtggagcttcatgagatgaacaactctaccaggtgcagcgtttgtaagctcttttctttgccaaactctaccaagctctttcgcggacaacacctgaatttgaagcttgcaatttgtaaagcactatgagcgagccctatgtttcagaaggctttctcttaaactctgatttcttgattggagttgttgtttaacattgattcagttcaatcatgcatgaatctaggtaatatatatccacctagctcgttttctgcaacaagatttgttatagattcatttttactcagcattttatgttctactcggcagcttcattttttatggatgtgtttgaataaagccttcgttaaagaaaaaaaaaaaaaa

SEQ ID NO: 10350 - protein, 210 aa, Zea mays
  misc_feature: Ceres CLONE ID no. 1622891
  misc_feature: Ceres CDNA ID no. 25446579
  misc_feature (191)..(208): Pfam Name: SEC PFAM Desc: SEC
  misc_feature: Homolog of GI Number: 2429362 NR Desc: proline rich protein
  misc_feature: Homolog of GI Number: 67987177 NR Desc: 4Fe
  misc_feature: Homolog of GI Number: 73950193 NR Desc:  similar to serine/arginine repetitive matrix 1 isoform 2
  misc_feature: Homolog of GI Number: 57043292 NR Desc:  similar to serine/arginine repetitive matrix 1
  misc_feature: Homolog of GI Number: 7949115 NR Desc: Ser/Arg
MASRQALHIFTPSRRAMHILTSSRGIASTPHLSSFGWFDKIKSTITGKKPEEASEASSFTLTQFADTMEKARKLGTFKNFVAGRASEATVVNVFEKHSAVLRYLGAIDPTGENLRNTDKINATKHCNCTIADVEHILAKYTWAKEAQKKIAKLKEEGKPLPKSFNEVQNLMGSTPVDVGRSNLAKSGQISRNAFCPCGSKKRYKRCCGAS

SEQ ID NO: 10351 - DNA, 1404 bp, Glycine max
  misc_feature: Ceres CLONE ID no. 1622956
  misc_feature: Ceres CDNA ID no. 35383485
  CDS (75)..(848): REFERENCED BY SEQ ID NO: 10352
aagtgaggctccccagccactttcccaacccaaaacctctcttcaaccctttctttctccaatcccaaaccatcatgtatcttccccgccaccacatcctcaccagactctccccttatcgccgccacttctcccactccgccgccgccgtcctccggcctccggggccggagcccctcacctacctggacggcttcccccgccccgatcccaagcacgacgagacgatcctcgccatcccccgcgccgactccggcaagaacatctccgccaaggaacgccgcgccgggcggcttccgagcatcgtgttcgagcaagaagacggccagcacggcggcaacaagcgcctcatctccgtccgcactgaccagatcagaaaactcgtcaaccacctcggccgctccttcttcctctcccgcctcttccacctccaagtccgcgcccacttcgactccgaggatgacttcgtcgagaccgtacgcgtcttgccccgcgcgattcatttgaaagctgggacggatgcgccgttgaatgtgacttttattagggctccgtcgaacgctctgttgaaggttgacgttcctcttgtgttcagaggagaagatgtatcgcctggactcaagaaaggtgcttctttgaataccatcaaaaggactgtcaagtacttatgccctgctgacattattcccccatacattgacgttgatctaagtgagttggatgtgggccagaagttggtcatgggagatctcaaagttcatcctgctttaaaacttcttcagtcaagagatgaagctgttgttaaaattatgggccaaagagtttctgaactacaaaagaaaaagtaactgctctttgtatctttgggggttattgctgctgcgctgaagcattttacagctaacatgtatcgttcatggtcattttattagttgattcatggcagcagtgagggacagttgtagaattccaatgttagtcttttgttaggttccttttctgtgcctattcagttccttcccatatttcaattctttgcttctgccgtttcttttggcaaaaatgaatacctaggggatgagaatatgaagttgatgcgttgagtttttgcatgcaatatcgattgttctgttttgggttattgggtacaagcagagagggttactaccactgatgtcctcatgtccttgataaataaatacttcacaccgcctttctagaactccagtttgaatttaaagtatctggcagttgatttatgaagttataaatttatttacatttagtcaatgtttgccctaatattagtttttgtttttttgtccatgttctaaaaagtgtgcgtgtagataaattgttcataatgatatgaaattcaattgctgcaaaaaaaaaaaaaaaaaa

SEQ ID NO: 10352 - protein, 257 aa, Glycine max
  misc_feature: Ceres CLONE ID no. 1622956
  misc_feature: Ceres CDNA ID no. 35383485
  misc_feature: Homolog of GI Number: 34912284 NR Desc: P0451D05.2
  misc_feature: Homolog of GI Number: 48848667 NR Desc: COG1825: Ribosomal protein L25
  misc_feature: Homolog of GI Number: 79042345 NR Desc: ribosomal 5S rRNA E
  misc_feature: Homolog of GI Number: 83845135 NR Desc: ribosomal protein L25
  misc_feature: Homolog of GI Number: 68053168 NR Desc: 50S ribosomal protein L25
  misc_feature: Homolog of GI Number: 75676696 NR Desc: Ribosomal protein L25
  misc_feature: Homolog of GI Number: 71153127 NR Desc: 50S ribosomal protein L25
  misc_feature: Homolog of GI Number: 13472406 NR Desc: 50S ribosomal protein L25
  misc_feature: Homolog of GI Number: 83595075 NR Desc: Ribosomal protein L25
  misc_feature: Homolog of GI Number: 49473974 NR Desc: 50s ribosomal protein l25
MYLPRHHILTRLSPYRRHFSHSAAAVLRPPGPEPLTYLDGFPRPDPKHDETILAIPRADSGKNISAKERRAGRLPSIVFEQEDGQHGGNKRLISVRTDQIRKLVNHLGRSFFLSRLFHLQVRAHFDSEDDFVETVRVLPRAIHLKAGTDAPLNVTFIRAPSNALLKVDVPLVFRGEDVSPGLKKGASLNTIKRTVKYLCPADIIPPYIDVDLSELDVGQKLVMGDLKVHPALKLLQSRDEAVVKIMGQRVSELQKKK

SEQ ID NO: 10353 - DNA, 1431 bp, Glycine max
  misc_feature: Ceres CLONE ID no. 1623097
  misc_feature: Ceres CDNA ID no. 25447506
  CDS (449)..(1084): REFERENCED BY SEQ ID NO: 10354
atcactcgttacaaactctgtttagatcatttcatctccatcaacctctccaacaaaataaatatccctttaccctattttctcgaatcttgtttgctatctcctgagtccggctaaatccttgccttttcagccagtttcctccgtcttcccaacctcaatcacacttatccatcacaccccatgtaacaactttctgtctctagctttgagctttttctttttcttttttcttcaaacacaaaacaactttctggaattagttacttctactctcaataaagttttttttttttttttatcatcagcttcatttattagtattttggtcggttctatatccttcctttttctttttgtcttctttccactttcccctcactttgttgtgagatcttgacaacaaagtgcgtgcttgaaaactgaagtcccttttaggaatacgagaatgcaggatccaacgttgttccaacccatgaaaccccactttccggaacaggagcagcttaaatgcccgcgctgtgactccaccaacaccaagttctgctactacaacaactacaacctctcgcagccacgccatttttgcaagaactgcagaaggtattggaccaaaggtggtgccttgagaaacatccctgttggtggtggaagcagaaagaacacaaagcgatcatcttcatccaacaacaacaccaaacgcgcttccccatcacccccagtttcctctgcacccgctccagaacccgaccctacccggattggccccaccccggttgttggtggcgggagtttcagttcccttttggcatcaagtggccatttgggcctggggaacctcttggagggtctgaattcaagtgggtctaatctgaaaactgtgcaaatggaagagtttggggagaatgttagttcgggtccggttgcggatccggattcgggtcggaatcccgggttggagatgcaaagcaatgggaacgcagagaattttctgagtttgcaaaatggtgattcaagctgttggaatggtactagtggttggtctcaccttgctattttcactcctgggtcaagctttcagtaatgacaaattaatgaatatgattactctgatctgtatatttagacatatgtcgtactattatggaggatcacaaaccagaaggccactgctataggatcattaggtaaagtttctcctgttttggatttttatatttgtgaattgtggttggtgttcttcagctatatcaatgatggaagagaaatggaaagcaagtcatattttagggcagggtatggggggtatatgaatgttgttgtagtgagattgttttcagtctcatcacgtagaggaagtgttgccatggcttggagattctaatttatttaatctatatatgtgtattttacaaaaaaaaaaaaaaaaaa

SEQ ID NO: 10354 - protein, 211 aa, Glycine max; identical to SEQ ID NO: 1904
  misc_feature: Ceres CLONE ID no. 1623097
  misc_feature: Ceres CDNA ID no. 25447506
  misc_feature (15)..(77): Pfam Name: zf PFAM Desc: Dof domain
  misc_feature: Homolog of GI Number: 23297302 NR Desc: Dof zinc finger protein
  misc_feature: Homolog of GI Number: 15027981 NR Desc: putative Dof zinc finger protein
  misc_feature: Homolog of GI Number: 3608261 NR Desc: dof zinc finger protein
  misc_feature: Homolog of GI Number: 37051131 NR Desc: DNA binding with one finger 5 protein
  misc_feature: Homolog of GI Number: 50399945 NR Desc: putative Dof zinc finger protein
  misc_feature: Homolog of GI Number: 37051127 NR Desc: DNA binding with one finger 3 protein
  misc_feature: Homolog of GI Number: 30680246 NR Desc: Dof
  misc_feature: Homolog of GI Number: 8439908 NR Desc: Strong similarity to zinc finger protein OBP2 from Arabidopsis thaliana gbAF155816. EST gbN65215 comes from this gene
  misc_feature: Homolog of GI Number: 20260006 NR Desc: strong similarity to zinc finger protein OBP2
  misc_feature: Homolog of GI Number: 5059394 NR Desc: zinc finger protein OBP2
  misc_feature: Useful for delaying flowering time
  misc_feature: Useful for making ornamental plants with modified leaves
  misc_feature: Useful for making plants with altered leaf shape eg curled leaves
  misc_feature: Useful for making plants with altered leaf shape eg curled leaves
  misc_feature: Useful for making plants with altered leaf shape eg curled leaves
  misc_feature: Useful for making plants with increased biomass and foliage
  misc_feature: Useful for making plants with increased biomass and foliage
  misc_feature: Useful for making shorter plants

SEQ ID NO: 10355 - DNA, 1457 bp, Glycine max
  misc_feature: Ceres CLONE ID no. 1623697
  misc_feature: Ceres CDNA ID no. 25892570
  CDS (80)..(1114): REFERENCED BY SEQ ID NO: 10356
atttgtttcgcagtcactactgttcatttcttataacaactctcatattaagccactgttgaatgaaaaccttgggaatatgagaaggccttgcaaacattctaagaagaaacatgatctctttgaatgtctccctgacgatctccttgtccttattctttctaagctcagctccaccgcttcttctccttctgatttcatcaacatcatcttaacatgcaagaggttaaaccggttaggcctgcaccgtcttgtgttatccaaagctgcctctaaactattcgccataaaaccgaaaaattggtcggaatatgctcactcttttctcaaacactgcgctaacgccggtaacgtggatgcctgttacactctcggaatgatccgattttactgtttgaaaaatcgagggagcggactctcgttaatggcgaaggcggccatgaagctgcacgcgccggctctgtactcgctggcggtgattcagttcaacggcagcggcggttcgaagcgcgacaaggatctacgcgcgggcgtggccttgtcggcgcgtgcgtcgttactcggccacatcgacgcgcttcgggagttaggccattgccttcaagacggttacggcgtgcggcagaacgtcacggaggggaggcggctactcgtgcaggccaacgtgcgcgagctcgcgtatgtcctacgcgccgtggcgccttcgcgctgctacgagacctcgctgctgacgtggcgcgcgctgagatgtcagagaaacaacaacaacaacaacgcggtggtggcatgtcctttgctgagtgattatggttacaacgtggcggcgccggaggtgcagccggcgaattggtttctgagagagtggtttgagtccggtaagggaaaattggaggaaggactaaggctttgcgcgcacattgggtgtggccgaccggagacgcggccgcacgagtttcgccggtgttcggtttgcggcaaagtgaattactgttctcgtggatgtcaggcgctggattggaagttgcggcataagatggagtgttcgccggtggaaatgtacgatggtggtgtggatggagagaatgagtttgtggtcccaaacgatgccgtttgaagaaatgtttcatgaaattccggtgcagaatgatttgaggcaaaagtcttcctgtcaaagaattaaaattctctactcttgccttcattttgtttttattcattggatctacggcatcacaacaacaacaacagttagcaacagttacaactcagcctacagaatcgatttctaaggtagaaaataagaaaaaaagaacagaaataaatagagaaaataagggattctataaattaaaaatatgtcaatgagttgtatgtaccatgtacagatgaggtagtaactttttttttaaatatatatatataaagtagatatacaactaaaaaaaaaaaaaaaaaaa

SEQ ID NO: 10356 - protein, 344 aa, Glycine max
  misc_feature: Ceres CLONE ID no. 1623697
  misc_feature: Ceres CDNA ID no. 25892570
  misc_feature (277)..(321): Pfam Name: zf PFAM Desc: MYND finger
  misc_feature: Homolog of GI Number: 19386803 NR Desc: OJ1485_B09.11
  misc_feature: Homolog of GI Number: 50923813 NR Desc: OSJNBa0084N21.16
  misc_feature: Homolog of GI Number: 50908799 NR Desc: F
MRRPCKHSKKKHDLFECLPDDLLVLILSKLSSTASSPSDFINIILTCKRLNRLGLHRLVLSKAASKLFAIKPKNWSEYAHSFLKHCANAGNVDACYTLGMIRFYCLKNRGSGLSLMAKAAMKLHAPALYSLAVIQFNGSGGSKRDKDLRAGVALSARASLLGHIDALRELGHCLQDGYGVRQNVTEGRRLLVQANVRELAYVLRAVAPSRCYETSLLTWRALRCQRNNNNNNAVVACPLLSDYGYNVAAPEVQPANWFLREWFESGKGKLEEGLRLCAHIGCGRPETRPHEFRRCSVCGKVNYCSRGCQALDWKLRHKMECSPVEMYDGGVDGENEFVVPNDAV

SEQ ID NO: 10357 - DNA, 945 bp, Zea mays
  misc_feature: Ceres CLONE ID no. 1623934
  misc_feature: Ceres CDNA ID no. 25447537
  CDS (331)..(546): REFERENCED BY SEQ ID NO: 10358
tgtccgttagttgctgctcccagttcagtaggccctctccataccacagcgcagcgtcagagatcccactacttcttgtttctagtctagtataaataaatgtgcatccaagtcactgatcaggagcaccaagccagctagcaactcaaaggaggaagactagaagatatatagccttctccttgtgtgacactcataaataaactgttagcagcttgcgagcactgcaagatctttctgctggcatctgaatagtcagctgctggcatctatccgggcacctctcgaccagccagaggcagatacctgatcccaaactagctggccaacatggcgaacgatgaccctgtggacgacgaaaaccccagatccaacaccactaataacagcatcaatgacaagttggctgaagtgttcgacatggtctcagtccacaaacatcagtataaaatgccgacgttcgccttccacaccaacaagacgatcaccgaagctttacatcggcctctactgcgagcacaagctagcatggtcacaacctcctagcctatatatgaactggtgttatcccgactgaacttttctttttgttgacacctttcgtcaggcctctccaccagaggttgactcgtatgtctgttttctggtttctcataccagaattaacgttcttgaccttgtaaggcctcttcttgaccttgtaaggctctcactctgtgtctgcatccttctcgcatcccttgtttccttctttcccactacatgcaggatcagtcccgatattgccgtgtttgccagccttctgcatccacctactttctgttcccttctatccctcctgagctaattgttgctcctatgtaatccgtgtttattatttcggtaccatgatgatgaaattagttttaatttattgtaagactagttcagcaaaaaaaaaaaaaa

SEQ ID NO: 10358 - protein, 71 aa, Zea mays; identical to SEQ ID NO: 496
  misc_feature: Ceres CLONE ID no. 1623934
  misc_feature: Ceres CDNA ID no. 25447537

SEQ ID NO: 10359 - DNA, 1219 bp, Glycine max
  misc_feature: Ceres CLONE ID no. 1624186
  misc_feature: Ceres CDNA ID no. 35383486
  CDS (417)..(1019): REFERENCED BY SEQ ID NO: 10360
actaaatgcagccttcattctttgaaactgaaacagaggtgacgacgcgacaccctacgccgacgacgtgaatcctttccggcgacggcacagtcgaccccaaacatacgccacttccgtgttttactcgcaaattgcggccgctattcccgcaacagcaaacttgtgacgtgagagcctgttgcatcgcggcggcactgggttttgcagcgggcgtgaattttttttaaatcacttcccggttgaaccacgtaaccggccgggttgaaccggtcataccggtttgatagcatggccgatccagtgtcctgctcgactcgtttactctcaattagccacttgcactctacctctctcaaccacaaataggtttttctctgttcgtgaactcaagttctcagtcacaaacaggtaacatgcctgagaatccactgcaggccttgtttcataacatcgaacaagtctcaagctttgttcaacaccatctctctaatttcataggcattcatttccagccatcaggaccccatagtggctctctcttatcaatctcttcctctaccaaagccccacttgcaaaaactgcatcttctgtacaactcggtgatactgctgtcaagggaaagtctgctgccccagttactaaggaagagcttggaagggctacttggactttccttcacattcttgcagctcagtacccggataatcctacaagacaacagaagaaggatgtaaaagaactggtacagatgttacctcgaatatacccttgcggggaatgtcgagatcactttaaagaagttcttagagcaaatcctgtacagactggatcgcatgctgaattttctcagtggttatgtcatgtgcataatgttgttaatagaagccttggcaaaccaatattcccctgtgaacgagttgatgcaaggtggggcaaactggactgtgaacagaatgcatgtgaaattattggtagtacatcaatttttaggaagatatggaagaaatctacctaaaaatgattgacatgcatactatgtgagaggtgttaaattttgaccttttgataattgttttagataggccaagggttatttgttggttatacaccagagtacgtgaatacattttatctccaatattcataactcggtttattatagtaaatgaaaatttaagcccggattatattgattaaaaaaaaaaaaaaaaaaaa

SEQ ID NO: 10360 - protein, 200 aa, Glycine max
  misc_feature: Ceres CLONE ID no. 1624186
  misc_feature: Ceres CDNA ID no. 35383486
  misc_feature (84)..(174): Pfam Name: Evr1_Alr PFAM Desc: Erv1 / Alr family
  misc_feature: Homolog of GI Number: 23271423 NR Desc: Growth factor
  misc_feature: Homolog of GI Number: 4995965 NR Desc: augmenter of liver regeneration
  misc_feature: Homolog of GI Number: 46909575 NR Desc: growth factor
  misc_feature: Homolog of GI Number: 7549740 NR Desc: growth factor
  misc_feature: Homolog of GI Number: 19074359 NR Desc: PROTEIN OF THE ERV1/ALR FAMILY
  misc_feature: Homolog of GI Number: 11559826 NR Desc: hepatopoietin protein
  misc_feature: Homolog of GI Number: 7576256 NR Desc: augmenter of liver regeneration
  misc_feature: Homolog of GI Number: 54112432 NR Desc: erv1
MPENPLQALFHNIEQVSSFVQHHLSNFIGIHFQPSGPHSGSLLSISSSTKAPLAKTASSVQLGDTAVKGKSAAPVTKEELGRATWTFLHILAAQYPDNPTRQQKKDVKELVQMLPRIYPCGECRDHFKEVLRANPVQTGSHAEFSQWLCHVHNVVNRSLGKPIFPCERVDARWGKLDCEQNACEIIGSTSIFRKIWKKST

SEQ ID NO: 10361 - DNA, 1169 bp, Zea mays
  misc_feature: Ceres CLONE ID no. 1624418
  misc_feature: Ceres CDNA ID no. 25446756
  CDS (173)..(946): REFERENCED BY SEQ ID NO: 10362
aattcagagctccttcgccgccgccctaggcccctagctttcccgcgagcgggacggcagccgccgtatcctccttcctccaataccgagcgggtccaggcaggtagcatcctcgcgccctgtcgtgtcgcctccgcctctgagttcagctcgccggcagccgccgcccgcaatggaggccctccggaaagcggaggcggagctcacggtgtacgtgcacccctccaacgccaagcgcgtccggcacgccgtatcccgccagcttagcgcgcttctcttcacgtatgtggaccgttttgatggcgtgttgctgatgcatgaagtttcattccttattggcaaagacaaagagggcaaacccatatatgaaaggagtgaccgtaatgatcaaattgctgaacccgtttcttatggcaaaatcatgaatggcttggtgccatatttcagcgtccaagtgcatgccaccctgctgctcttctctccccagccggacatgatcctggaagggatggttgaaatgcttgggaaggagtcaattcatgccattgtattaggggttttctcagtggcaattatgtctgaagatattaagttcaaattcaaatggaaaagtgatggagggaaatttgtgagcctcacagataaaaaacatgtgattgaaagaggaacaatgataaggttttctgtcaaaagggtggatacagaaatgagttgtcatattactggatctttaatcccacctcacactggatgcatgcgttggttgtcagtacatgatcctaaatatgcatcagaactcaaaagtggtgaaagtagatcaagggatacaagcatcaaaattgagcagaatgaacaagaacatagaatactcaagaatgaagatggcatggtgaaatctgaacggccatataaatcccgaaagagggtgcggcacattgagaaatgacatttcattgaggccgtgaagatacaagttggagatcccggtagcttcatagaaatgtacgatgattttgtaaaacgaattgagggttgcatttgcaaattatcaccttttttgacaagatagtagtaactgatctcatcgaaggggtttagtggcaaatgacaagtcccatgtttcaattatagcccgggcttatgttgggtccaaaaaaaaaaaaaaaaaa

SEQ ID NO: 10362 - protein, 257 aa, Zea mays
  misc_feature: Ceres CLONE ID no. 1624418
  misc_feature: Ceres CDNA ID no. 25446756
  misc_feature: Homolog of GI Number: 55741414 NR Desc: RNA polymerase Rpa43 subunit
  misc_feature: Homolog of GI Number: 9369364 NR Desc: F10A5.14
MEALRKAEAELTVYVHPSNAKRVRHAVSRQLSALLFTYVDRFDGVLLMHEVSFLIGKDKEGKPIYERSDRNDQIAEPVSYGKIMNGLVPYFSVQVHATLLLFSPQPDMILEGMVEMLGKESIHAIVLGVFSVAIMSEDIKFKFKWKSDGGKFVSLTDKKHVIERGTMIRFSVKRVDTEMSCHITGSLIPPHTGCMRWLSVHDPKYASELKSGESRSRDTSIKIEQNEQEHRILKNEDGMVKSERPYKSRKRVRHIEK

SEQ ID NO: 10363 - DNA, 2113 bp, Zea mays
  misc_feature: Ceres CLONE ID no. 1624848
  misc_feature: Ceres CDNA ID no. 25447241
  CDS (80)..(1951): REFERENCED BY SEQ ID NO: 10364
aaccatcgccgtccccgtccatgcgccgctgaccgcgcgcgccatcaaagccaattacccagccatctagctatcagccatgtattcggccaaccactggggcggctcgttcgagatcgccgatggcgcggcggaggacgaccacagccgcaacatggacctggaccgcggcgcgctctcggcgcggcagcaccacgagctggacgagacccagcagagctggctgctgggcccgccggaggccaagaagaaggacaagtacgtggacctcggttgcatcgtcgtcaagcgcaagatgctctggtgggccttgtggtgcgtcgtcgccgctttcgtcctcatcggcctccccatcatcatcgccaagtccatcccgcacaagaagccaggcccgccgccgccagatcagtacacagatgcgctgcacaaggcgctcctcttcttcaatgcccagaaatccggccaccttcccaagaacaatggcatcaagtggcgcgggaactctggcctgtcagacggctccgacgccaaggacgtcaagggtggcctcgtcggcggctactacgacgctggcgacaacatcaagttccacttcccgatggccttctccatgacgctgctgagctggtcggtgatcgagtacagcgccaagtacaaggccatgggggagtatgaccatgtcagggagctcatcaagtggggcaccgactatctgctgctcaccttcaactcatctgcttccaccatcgacaagttatacgctcaggtgggtactgctaagatcaacggcagccggccggacgaccattactgctggaaccggccggaggacatggcatatcctcgcccttcactgtccgtgagctccgcccctgatctgggtggcgaggtcgccgctgccctggcggccgcctccatcgtgttccgcgacaacgccacctactccaagaagctcagccagggcgcggccaccgtgtacaagttcgcgcggcagtcgggtcggcgcaccccctactcgctccgtcagccggacatcgagtactactacaactccaccagctactgggacgagtacatgtggagcgcggcgtggatgtactacgccacgggcaacaacagctacctcaccttcgccaccgacccgcggctgcccaagaacgccaaggccttcttcaacatcctcgacttctccgtgttcagctgggacaacaagctcccgggcgcccagctgctgctgtcgcggctgcgcatgttcctcaaccccggctacccgtacgaggagtcgctcgccggctaccacaacgccaccagcctcaacatgtgcatgtacttcccgcgcttcgccgccttcaacttcaccaagggcgggatggcgctcttcaaccacggcagggggcagccgctgcagtacgtcgtcgccaactccttcatcgctgcgctctacgccgactacatggaggccgtcaacgtccccggctggtactgcggtccaaacttcatgaccaccaacgacctccgtgagttcgccaggtctcagatcaactacattctcggtgacaaccccaagaagatgagctacgtggttgggttcggcagcaagtacccacggcacgtgcaccaccgtggcgcgtccacgccgcacaacggcgtcaagtactcgtgcaccggcggctacaagtggcgcgacagcaagaaagcggaccccaacctgctggggggcgccatggtcggcgggcccgacaagaacgacggcttcaaggactcgcgcaacaccttcgggcagaacgagccgacgctggtaggcaacgccggcctcgtcgcggccctggtggctctcaccagcagcggcaggggagtcggcgtaaccgccgtcgacaagaacaccatgttctccgccgtgccgccaatgttccccgccgcgccgccaccaccgtcatcatggaagccatgacgaccgtgaacattcatggtcatacgattttttgtgatcgatcacgtacgcgcgcgaattctcttctgtacaataccacacgtaaattaacagtacgtgtaagcaaatatatagtacgtagcgcacggtggatcatcggccggacaaaaaaaaaaaaaaaaa

SEQ ID NO: 10364 - protein, 623 aa, Zea mays
  misc_feature: Ceres CLONE ID no. 1624848
  misc_feature: Ceres CDNA ID no. 25447241
  misc_feature (110)..(586): Pfam Name: Glyco_hydro_9 PFAM Desc: Glycosyl hydrolase family 9
  misc_feature: Homolog of GI Number: 25090115 NR Desc: At5g49720/K2I5_8
  misc_feature: Homolog of GI Number: 50346662 NR Desc: Cel9A
  misc_feature: Homolog of GI Number: 50925979 NR Desc: OSJNBa0067K08.14
  misc_feature: Homolog of GI Number: 8978269 NR Desc: cellulase homolog OR16pep precursor
  misc_feature: Homolog of GI Number: 24475521 NR Desc: endo
  misc_feature: Homolog of GI Number: 7527353 NR Desc: endo
  misc_feature: Homolog of GI Number: 32454474 NR Desc: endo
  misc_feature: Homolog of GI Number: 2065531 NR Desc: endo
  misc_feature: Homolog of GI Number: 42765931 NR Desc: endo
  misc_feature: Homolog of GI Number: 46318067 NR Desc: membrane
MYSANHWGGSFEIADGAAEDDHSRNMDLDRGALSARQHHELDETQQSWLLGPPEAKKKDKYVDLGCIVVKRKMLWWALWCVVAAFVLIGLPIIIAKSIPHKKPGPPPPDQYTDALHKALLFFNAQKSGHLPKNNGIKWRGNSGLSDGSDAKDVKGGLVGGYYDAGDNIKFHFPMAFSMTLLSWSVIEYSAKYKAMGEYDHVRELIKWGTDYLLLTFNSSASTIDKLYAQVGTAKINGSRPDDHYCWNRPEDMAYPRPSLSVSSAPDLGGEVAAALAAASIVFRDNATYSKKLSQGAATVYKFARQSGRRTPYSLRQPDIEYYYNSTSYWDEYMWSAAWMYYATGNNSYLTFATDPRLPKNAKAFFNILDFSVFSWDNKLPGAQLLLSRLRMFLNPGYPYEESLAGYHNATSLNMCMYFPRFAAFNFTKGGMALFNHGRGQPLQYVVANSFIAALYADYMEAVNVPGWYCGPNFMTTNDLREFARSQINYILGDNPKKMSYVVGFGSKYPRHVHHRGASTPHNGVKYSCTGGYKWRDSKKADPNLLGGAMVGGPDKNDGFKDSRNTFGQNEPTLVGNAGLVAALVALTSSGRGVGVTAVDKNTMFSAVPPMFPAAPPPPSSWKP

SEQ ID NO: 10365 - DNA, 778 bp, Zea mays
  misc_feature: Ceres CLONE ID no. 1625341
  misc_feature: Ceres CDNA ID no. 25446580
  CDS (147)..(569): REFERENCED BY SEQ ID NO: 10366
gactccttcgaggttgcggcggcgcgctcctccgccacccccttcttcttcagtttccctcacattactgccactgacgttcattccgtttccttgcttgctccaggtactcccatcgctatcgaccgggtcctcgagcgcgggagatggcggatcaggagaccccagttgcagttgaggcccctaccccggtccttggggagccgatggacttgatgactgctctgcagcttgtcatgaagaagtcgggtgctcatgatggccttgttaagggtcttcgtgaggctgccaaagcaattgagaagcatgctgctcagctttgcgtgcttgcggaggactgtgaccagcctgattatgtcaagctggtgaaggctctttgctctgagcacaacgttcacctggttactgtgcctagcgctaaaactcttggcgaatggtctgggctttgcaagattgattctgagggcaaggcgaggaaggttgtgggttgctcctgtgttgtcgtcaaggactatggcgaagaatctgagggccttaacatagttcaggagtacgtcaagtcacactagatacagtgcatcggtatctggaacttgtgctctacactagctttaagacctgaatttaaatttgtgctggttcttgggcttttctaggagattatctcaattcttgttttaagtgatgtcatctggtgttaatacaaatcattaagcggtggtattctgcttctgttctttgttaccaaaaaaaaaaaaaaaaaaaaaaaaaaaaaaaa

SEQ ID NO: 10366 - protein, 140 aa, Zea mays; identical to SEQ ID NO: 5498
  misc_feature: Ceres CLONE ID no. 1625341
  misc_feature: Ceres CDNA ID no. 25446580
  misc_feature (25)..(120): Pfam Name: Ribosomal_L7Ae PFAM Desc: Ribosomal protein L7Ae/L30e/S12e/Gadd45 family
  misc_feature: Homolog of GI Number: 50934241 NR Desc: putative ribosomal protein S12
  misc_feature: Homolog of GI Number: 50935291 NR Desc: putative 40S ribosomal protein S12
  misc_feature: Homolog of GI Number: 5106775 NR Desc: ribosomal protein S12
  misc_feature: Homolog of GI Number: 21536844 NR Desc: 40S ribosomal protein S12
  misc_feature: Homolog of GI Number: 21537373 NR Desc: 40S ribosomal protein S12
  misc_feature: Homolog of GI Number: 50935293 NR Desc: putative 40S ribosomal protein S12
  misc_feature: Homolog of GI Number: 28566194 NR Desc: 40S ribosomal protein
  misc_feature: Homolog of GI Number: 18845074 NR Desc: 40S ribosomal protein S12
  misc_feature: Homolog of GI Number: 24266978 NR Desc: ribosomal protein S12
  misc_feature: Homolog of GI Number: 50344482 NR Desc: S12e ribosomal protein

SEQ ID NO: 10367 - DNA, 923 bp, Zea mays
  misc_feature: Ceres CLONE ID no. 1625685
  misc_feature: Ceres CDNA ID no. 35383488
  CDS (212)..(685): REFERENCED BY SEQ ID NO: 10368
gtgaaataattgctactccgtacctatttctctcgccggcgacgagcctccgcggaaaccagtgccaagccagaggtgcttctttctccgccagactgctgctccgcgcgagaagagccaccacggagtctgcgtgactcgggacagtggagaaaatcagcggcacagcgtgggtctcgcgacctccagcgaacgtggatttgggactgcgatggaggagcagttcatcctccgcgtgccgccatccgtcgcagagcggatcgagcgcctcatgaatgaatccgccgcctcctcctccaaccccgacgaggcctccctggacctctccttctcagaggatggaagaaatggcacatttatgatcggtaatgagagctttcctgcttctctcttggatctacctgctgtggtggagtcatacaaaacatatgatgattctgtactaattaaaactgctgatgttggtcaggcagagctggttaaccaagttgagaagcatcttatcagtatcatgcatggagtatctgtcaaccagaacgccagtgcgacaggaggcgaagaaggtggtgatcgtaagaaacctccagtagctcgtgcagccaagcagcctggggttcaggagcccgccgcgaatggagaggaagctgatcctgagaggagcgacagtgatgattcggataactgaaatggaggacctggactgggtgcagcctcagtggtccaggcgagccatgccaaacttcgcaatttgaataaatcagaatgtatatatttgtaacaaacaatgtgttcgttgttcgctgaagcatgtactgtcacggtaaacatgatgtgacgctctaatgccaaacaagatgatgttactgcatctactagcaaaaaaaaaaaaaaaaaaaaaaaagaaaaaaaaaaaaaaaaaaaaa

SEQ ID NO: 10368 - protein, 157 aa, Zea mays
  misc_feature: Ceres CLONE ID no. 1625685
  misc_feature: Ceres CDNA ID no. 35383488
  misc_feature (1)..(141): Pfam Name: TAFII55_N PFAM Desc: TAFII55 protein conserved region
  misc_feature: Homolog of GI Number: 39545922 NR Desc: TAF7
  misc_feature: Homolog of GI Number: 79319993 NR Desc: transcription factor
  misc_feature: Homolog of GI Number: 55296876 NR Desc: TATA
  misc_feature: Homolog of GI Number: 34911770 NR Desc: OJ1316_H05.12
  misc_feature: Homolog of GI Number: 17921978 NR Desc: TAF7
  misc_feature: Homolog of GI Number: 56469456 NR Desc: TFIID subunit
  misc_feature: Homolog of GI Number: 50745656 NR Desc:  similar to TATA box
MEEQFILRVPPSVAERIERLMNESAASSSNPDEASLDLSFSEDGRNGTFMIGNESFPASLLDLPAVVESYKTYDDSVLIKTADVGQAELVNQVEKHLISIMHGVSVNQNASATGGEEGGDRKKPPVARAAKQPGVQEPAANGEEADPERSDSDDSDN

SEQ ID NO: 10369 - DNA, 512 bp, Zea mays
  misc_feature: Ceres CLONE ID no. 1625805
  misc_feature: Ceres CDNA ID no. 36707446
  CDS (74)..(322): REFERENCED BY SEQ ID NO: 10370
attgattgatcggacggacgcgcgtctccggtcccgtccgtaataacactgatccgatccacgccggccggcgatggagctcatcaagtccagggcgaccgtgtgcgcgctcctcctggcgctgctcctgctctcacactacgacggcgggacgacgacgacgatggtggcggaggcccgggtgtgcatgggcaagagccagcaccactcgttcccctgcatctccgaccgcctctgcagcaacgagtgcgtcaaggaggacggcgggtggaccgccggctactgccacctccgctactgcaggtgccagaaggcgtgctaagcaaagctcttcaaacacccttggcttgccagaactgaactctagtagtactaagtaacacccttggctagctgtgcacaacctacgtaccgtgcatgcatgtaatgtggtgtcatgtaacgtgacagcaataaatagtattaataataataacacggcatgtagccaagcaaaaaaaaaaaaaaaaaaa

SEQ ID NO: 10370 - protein, 82 aa, Zea mays; identical to SEQ ID NO: 4784
  misc_feature: Ceres CLONE ID no. 1625805
  misc_feature: Ceres CDNA ID no. 36707446
  misc_feature (36)..(82): Pfam Name: Gamma PFAM Desc: Gamma
  misc_feature: Homolog of GI Number: 2130034 NR Desc: gamma
  misc_feature: Homolog of GI Number: 2501197 NR Desc: Gamma
  misc_feature: Homolog of GI Number: 1173436 NR Desc: Small protein inhibitor of insect alpha
  misc_feature: Homolog of GI Number: 7451437 NR Desc: gamma
  misc_feature: Homolog of GI Number: 7451438 NR Desc: omega
  misc_feature: Homolog of GI Number: 533692 NR Desc: protease inhibitor

SEQ ID NO: 10371 - DNA, 884 bp, Zea mays
  misc_feature: Ceres CLONE ID no. 1625815
  misc_feature: Ceres CDNA ID no. 35383489
  CDS (69)..(773): REFERENCED BY SEQ ID NO: 10372
atcaaccatattattgagaccaacaagcaacatagaaagtggaatccagtagcaacaatagagcaacaatggcgaccaagatattttccctccttatgctccttgctctttctacatgtgttgctaacgcgacaattttccctcaatgctcacaagctcctatagcttcccttcttcccccgtacctctcaccagcggtgtcttcggtatgtgaaaacccaattcttcaaccctacaggatccaacaggcaatcacagctggcatcttacctttatcacccttgttcctccaacaatcatcagccctattacatcagttacctttggtgcatttattggcacaaaacatcagggcacaacaactacaacaacttgtgctagcaaaccttgctgcctactctcagcaacagcagtttcttccattcaaccaactagctgcattgaactctgcttcttatttgcaacaacaacaactaccattcagccagctacctgctgcctacccccagcaatttcttccattcaaccaactggcagcattgaactctcctgcttatttacagcagcaacaactactaccattcagccagctagctggtgtgagccctgctaccttcttgatacaaccacagttgttgccgttctaccagcacgctgcgcctaacgctggcaccctcttacaactgcaacaattgctgccattcaaccaacttgctttgacaaacccagcagcgttctaccaacaacccatcattggtggtgccctcttttagatttcttatgagttatagttcaataataaagttttttgtctgatgtttgtggcttcccagaaataagaaagtacatttctagattcttaaaaaaaaaaaaaaaaaaaaaaa

SEQ ID NO: 10372 - protein, 234 aa, Zea mays
  misc_feature: Ceres CLONE ID no. 1625815
  misc_feature: Ceres CDNA ID no. 35383489
  misc_feature: null
  misc_feature: Useful for making plants with modulated nitrogen use efficiency
  misc_feature (1)..(98): Pfam Name: Zein PFAM Desc: Zein seed storage protein
  misc_feature: Homolog of GI Number: 168691 NR Desc: zein
  misc_feature: Homolog of GI Number: 16305125 NR Desc: 19kD alpha zein B1
  misc_feature: Homolog of GI Number: 72315 NR Desc: 19K zein precursor
  misc_feature: Homolog of GI Number: 224509 NR Desc: zein E19
  misc_feature: Homolog of GI Number: 809117 NR Desc: zein
  misc_feature: Homolog of GI Number: 22446 NR Desc: 19 kDa zein
  misc_feature: Homolog of GI Number: 22534 NR Desc: zein
  misc_feature: Homolog of GI Number: 535020 NR Desc: zein Zd1
  misc_feature: Homolog of GI Number: 224508 NR Desc: zein A20
  misc_feature: Homolog of GI Number: 224513 NR Desc: zein M6
MATKIFSLLMLLALSTCVANATIFPQCSQAPIASLLPPYLSPAVSSVCENPILQPYRIQQAITAGILPLSPLFLQQSSALLHQLPLVHLLAQNIRAQQLQQLVLANLAAYSQQQQFLPFNQLAALNSASYLQQQQLPFSQLPAAYPQQFLPFNQLAALNSPAYLQQQQLLPFSQLAGVSPATFLIQPQLLPFYQHAAPNAGTLLQLQQLLPFNQLALTNPAAFYQQPIIGGALF

SEQ ID NO: 10373 - DNA, 946 bp, Glycine max
  misc_feature: Ceres CLONE ID no. 1625939
  misc_feature: Ceres CDNA ID no. 29191472
  CDS (85)..(630): REFERENCED BY SEQ ID NO: 10374
attccacacagcatttaagaaactcaagagatagaaagaaaataaagagaaggagaagagaagaagagaaaggttgtgagagatatggggaggggtaagattgagatcaaaaggattgagaactcaagcaacaggcaagttacctactcaaagaggaagaatgggatcctcaagaaggcaaaggaaattagtgttctatgtgatgctcaagtttcccttatcatctttggtgtctccgggaagatgcatgaatacatcagcccctacaccacgttgattgacgttctggacagataccaaagagcttctgggaagaccctctgggatgctaagcatgagaacctcagcaatgaaattgatagactcaagaaagagaatgacagcatgcaaattgagctcaggcacttgaaaggggaggacatcacgtcactcaattacaaggaactgatggcactagaggatgcccttgaaaatggcctcagtggagtccgtgagaaaaagatggaagtgcacaggatgttcaagagaaatggcaagattttggaggagcaaaataaggaactcagtttccttctgcaacagcatttggcagtagaaggaattggaaacatgcatgaacaatggatttgacgagatcaaaaggggattcaattcgcatatgcaacgcgcagctagcctaaaacagccaaatctaaaagaattattgaattcgtatttcttaaagctcggtagtgtacgtagctctaaaacttgctatacgattattgaattcgatctaattacgaaactatcaatattatataacgtgtatgctgcatatcattacgattattgagctatatatgttgcatatggagaaatgctaattacttgcatgagtttaatttttatatagtatgaaaaaagaattgctaaaattaaaaaagaaaaaaaaaaaaaaaaaaaa

SEQ ID NO: 10374 - protein, 181 aa, Glycine max
  misc_feature: Ceres CLONE ID no. 1625939
  misc_feature: Ceres CDNA ID no. 29191472
  misc_feature (71)..(170): Pfam Name: K PFAM Desc: K
  misc_feature (9)..(59): Pfam Name: SRF PFAM Desc: SRF
  misc_feature: Homolog of GI Number: 56785938 NR Desc: MADS box transcription factor PEAM1
  misc_feature: Homolog of GI Number: 60100346 NR Desc: MADS box protein PIb
  misc_feature: Homolog of GI Number: 60100344 NR Desc: MADS box protein PIa
  misc_feature: Homolog of GI Number: 15022157 NR Desc: MADS box protein
  misc_feature: Homolog of GI Number: 4105097 NR Desc: MADS box protein 26
  misc_feature: Homolog of GI Number: 4218173 NR Desc: MADS
  misc_feature: Homolog of GI Number: 27804369 NR Desc: MADS
  misc_feature: Homolog of GI Number: 22667 NR Desc: PMADS2
  misc_feature: Homolog of GI Number: 454265 NR Desc: FBP3
  misc_feature: Homolog of GI Number: 16024 NR Desc: globosa
  misc_feature: Useful for delaying flowering time
  misc_feature: Useful for increasing chlorophyll and photosynthetic capacity
MGRGKIEIKRIENSSNRQVTYSKRKNGILKKAKEISVLCDAQVSLIIFGVSGKMHEYISPYTTLIDVLDRYQRASGKTLWDAKHENLSNEIDRLKKENDSMQIELRHLKGEDITSLNYKELMALEDALENGLSGVREKKMEVHRMFKRNGKILEEQNKELSFLLQQHLAVEGIGNMHEQWI

SEQ ID NO: 10375 - DNA, 1145 bp, Glycine max
  misc_feature: Ceres CLONE ID no. 1625952
  misc_feature: Ceres CDNA ID no. 40041509
  CDS (76)..(675): REFERENCED BY SEQ ID NO: 10376
actctcttcgccgctctctctctccttctcgctctttcagctttgacttttgttggaaactaaggcctaatcaaaatggtgaagttcacagctgaagagctacgtcgtattatggactataagcataatatccgtaatatgtctgtcattgctcatgttgatcacggaaaatcaaccctcactgattctcttgtggctgctgctggtattattgctcaagaagttgccggtgatgtccgtatgactgatacccgtgcagatgaagctgagcgtggtattaccatcaagtctacaggtatctcactctactatgaaatgactgatgaagctctcaagagttttaagggagagcgcaatgggaatgagtatcttatcaatctcattgactcccctgggcacgttgacttctcatctgaggttactgctgcactccgtattactgatggagctctagttgtggtcgattgtgtggaaggagtttgtgtccaaactgaaactgtgctaagacaagcccttggagaaaggattaggcctgttctgactgtcaataagatggacaggtgcttccttgaactccaggttgatggagaggaggcttaccagacattccagagggttattgagaatgctaatgttatcatggctacatatgaagatccactacttgctctttaaaaactcttcagtttatgttgagggtgacattgagattagagtttataatgatagcatcaacggtgaagttaaaagcattccagagatatgtgttcgccgcgacgggaaaatttgcctcatcaagagtggggagagcattgataaaacttccttggatgaattgcgagaagggttgttttagggaaatctgaccatctaacggaagcatatacttctgtgagaaacttcaccttgttgtagcagcatttgtaatgaatgctttggtcctcgattttatttttttaatatacattatttagcattctgaatttcagtttcccatggttattttcatgtgagagaggcagaagaacatacttgctttggtcctcaaacttggtagtatatagttctaaatttatcatatcttcttaaagttttgcttatgtatgaaagcatttccttcataataaaaaaaaaaaaaaaaaaaa

SEQ ID NO: 10376 - protein, 199 aa, Glycine max
  misc_feature: Ceres CLONE ID no. 1625952
  misc_feature: Ceres CDNA ID no. 40041509
  misc_feature: Homolog of GI Number: 23397162 NR Desc: putative elongation factor
  misc_feature: Homolog of GI Number: 6056373 NR Desc: elongation factor EF
  misc_feature: Homolog of GI Number: 2369714 NR Desc: elongation factor 2
  misc_feature: Homolog of GI Number: 50921395 NR Desc: OSJNBa0020P07.3
  misc_feature: Homolog of GI Number: 50909007 NR Desc: putative elongation factor 2
  misc_feature: Homolog of GI Number: 57899961 NR Desc: putative Elongation factor 2
  misc_feature: Homolog of GI Number: 34909390 NR Desc: putativeelongation factor 2
  misc_feature: Homolog of GI Number: 34910726 NR Desc: putative elongation factor 2
  misc_feature: Homolog of GI Number: 119167 NR Desc: Elongation factor 2
  misc_feature: Homolog of GI Number: 29539334 NR Desc: elongation factor
MVKFTAEELRRIMDYKHNIRNMSVIAHVDHGKSTLTDSLVAAAGIIAQEVAGDVRMTDTRADEAERGITIKSTGISLYYEMTDEALKSFKGERNGNEYLINLIDSPGHVDFSSEVTAALRITDGALVVVDCVEGVCVQTETVLRQALGERIRPVLTVNKMDRCFLELQVDGEEAYQTFQRVIENANVIMATYEDPLLAL

SEQ ID NO: 10377 - DNA, 769 bp, Glycine max
  misc_feature: Ceres CLONE ID no. 1626012
  misc_feature: Ceres CDNA ID no. 40041510
  CDS (50)..(493): REFERENCED BY SEQ ID NO: 10378
agagctgcaagggatcaactgaggagagtgagagaaaagagaagagaagatgacaacacgcttcaagaagaacaggaagaagaggggccacgtcagcgctggccacggtcgaatcggaaagcacaggaagcaccctggaggacgcggtaacgccggaggcatgcaccaccacaggatcctcttcgacaaataccaccctgggttcttcggcaaggtaggaatgcgctattttcacaagcttcgcaacaaattctactctccgatcctcaacatcgacaagctgtggtccctggtcccgcaagaagtgaaggacaaggcctccaaggagaacaaggcgccgctcatcgacgtcacgcagttcgggtactttaaggttctcggaaagggcgttttgccgcagaaccagcccgttgtggtcaaggccaagcttatttccaagatcgctgagaagaagatcaaagaggctggcggcgccgttgttctcaccgcttgaatttgacggtatcacttttttgaacgatttaggttttgttctgatacgttttgttttggattatgttgttgtttagtctctgctatatttcaggattaaattgaaggttttattattttaatttgcgcgattaactatgccagcctgatgacattagaatctatcgaaattgttaaaattgagcatgttagctttcgtattattggacctatgacatttgaaattaggttttttgctatggattgaacttcacccgaaaaaaaaaaaaaaaaaaaa

SEQ ID NO: 10378 - protein, 147 aa, Glycine max; identical to SEQ ID NO: 5346
  misc_feature: Ceres CLONE ID no. 1626012
  misc_feature: Ceres CDNA ID no. 40041510
  misc_feature (108)..(141): Pfam Name: L15 PFAM Desc: Ribosomal protein L15
  misc_feature: Homolog of GI Number: 3608481 NR Desc: ribosomal protein L27a
  misc_feature: Homolog of GI Number: 76160998 NR Desc: ribosomal protein L27a
  misc_feature: Homolog of GI Number: 20147177 NR Desc: At1g70600/F5A18_22
  misc_feature: Homolog of GI Number: 21553702 NR Desc: 60S ribosomal protein L27A
  misc_feature: Homolog of GI Number: 7959355 NR Desc: 60S ribosomal protein L27a
  misc_feature: Homolog of GI Number: 23308283 NR Desc: At1g23290/F26F24_23
  misc_feature: Homolog of GI Number: 50939233 NR Desc: putative 60S ribosomal protein L27a
  misc_feature: Homolog of GI Number: 50916422 NR Desc: putative ribosomal protein L27a
  misc_feature: Homolog of GI Number: 50251205 NR Desc: putative 60S ribosomal protein L27a
  misc_feature: Homolog of GI Number: 22758850 NR Desc: ribosomal protein L22
  misc_feature: Useful for making plants with altered leaf shape eg curled leaves
  misc_feature: Useful for making plants with increased biomass

SEQ ID NO: 10379 - DNA, 658 bp, Glycine max
  misc_feature: Ceres CLONE ID no. 1626032
  misc_feature: Ceres CDNA ID no. 40352062
  CDS (23)..(445): REFERENCED BY SEQ ID NO: 10380
agtgagagagagagaaggcaagatgtcgaagagaggacgcggtggttcggcggggaacaagttccggatgtcgctgggtctgccggtggcggcgacggtgaactgcgccgacaatacgggggcgaagaacctctacatcatatcggtgaaagggatcaaagggcgtttgaaccgtctcccctcggcttgcgttggcgacatggtgatggccaccgtgaagaaggggaaacccgatctgaggaagaaggttttgccagctgtcattgttcgccagcgcaagccatggcgccgaaaggacggcgtctacatgtatttcgaagataatgctggtgttattgtcaatcccaaaggagaaatgaaaggttctgctatcactggtcccattggaaaagagtgtgctgatctgtggccaaggattgcaagtgcagccaatgctatcgtttgagtgggaattcttgttaaatgagttttatgtttaagcttgtaggactgaaatttgtctcaggtttttttcaagcttgaaattgaattacaagtgatacagttttttttatccttcgtaacttgttatcagccagaagctttttgaagagacgagattaattcttatttaagaattttgttcttgttttttgttcaaaaaaaaaaaaaaaaaaaa

SEQ ID NO: 10380 - protein, 140 aa, Glycine max
  misc_feature: Ceres CLONE ID no. 1626032
  misc_feature: Ceres CDNA ID no. 40352062
  misc_feature: The plant is abnormally small.
  misc_feature: Useful for making plants with modulated biomass
  misc_feature (19)..(140): Pfam Name: Ribosomal_L14 PFAM Desc: Ribosomal protein L14p/L23e
MSKRGRGGSAGNKFRMSLGLPVAATVNCADNTGAKNLYIISVKGIKGRLNRLPSACVGDMVMATVKKGKPDLRKKVLPAVIVRQRKPWRRKDGVYMYFEDNAGVIVNPKGEMKGSAITGPIGKECADLWPRIASAANAIV

SEQ ID NO: 10381 - DNA, 665 bp, Glycine max
  misc_feature: Ceres CLONE ID no. 1626088
  misc_feature: Ceres CDNA ID no. 40041511
  CDS (58)..(441): REFERENCED BY SEQ ID NO: 10382
gtgcgcaattgtgtgaggaaatatctctcacgagtttgtataaggagagaagcgggcatgaagaagcaattagcatcaaggcgtttgctgatgtgggttatggtacatttgagcatttcaggcgtgttgtccaagtccaaccacaccacaacttctctgctgtgcgatggctccgtagaagactgcctccacgttcaccacttggactcacagcttcccaccatctccagctcccacttccgcagaatcctcgctggaggatcatgctcccaaaataaatttgcgactggatgtacacctgatgcctctcttgccgccggccctatgggtctcaccggtcgttatgttgctaatggggtcagacctgattcgggtccacccagccgatgtgctaatacatatcccggcgtcgtccccagggattgctttaatcctcattaaaataagctatgatcgccacaagctatttatgtattatttctaatgcttttgcttcctccctccctctatccactgttgttgtccaatgtctctattattgtgcatttttccgttattgcaacaataacatccgtcccctgaactggacaaattccggggaagagattctgaacgtgtatatcattatgtgtatgcttttcttgtaaaaaaaaaaaaaaaaaaaa

SEQ ID NO: 10382 - protein, 127 aa, Glycine max
  misc_feature: Ceres CLONE ID no. 1626088
  misc_feature: Ceres CDNA ID no. 40041511
MKKQLASRRLLMWVMVHLSISGVLSKSNHTTTSLLCDGSVEDCLHVHHLDSQLPTISSSHFRRILAGGSCSQNKFATGCTPDASLAAGPMGLTGRYVANGVRPDSGPPSRCANTYPGVVPRDCFNPH

SEQ ID NO: 10383 - DNA, 656 bp, Glycine max
  misc_feature: Ceres CLONE ID no. 1626129
  misc_feature: Ceres CDNA ID no. 40352063
  CDS (19)..(504): REFERENCED BY SEQ ID NO: 10384
gttacttggttcactcgaatggcgacatccttgtcaaacatgttcttgaagggaatcgcagctcgttctctcagcagacccttaaatgggttgttttattgcacaagatactcgactactgtgtcaaatgattctgacacgcatgatgacttcaagccagctaataagcttgagaattctggcatttctttgtcaaatgttattgagcaggatgtcaaggataatcctgttatggtttacatgaaaggtgtgcctgattttccacaatgtggatttagttcgcttgctgtaagagttttaaaacactatgatgttcctattagtgctagaaacattttggatgatcctgaccttaaaaatgctgtaaaagccttcggtaactggccaacatttcctcaaattttcatcaagggagagtttattggtggatcagatattgttctcaatatgcaccagactggtgaattgaaggaaaagcttaaagatattacttccaagcagtgaacacacgcctaaggtgaagaagttttaagagatgtagtttacaagaacttgcttatcaactattaagagatgtgaatactttgtactttaatttctggattatattcaaataagaagtttcaacattcctgtaaaaaaaaaaaaaaaaaaaa

SEQ ID NO: 10384 - protein, 161 aa, Glycine max
  misc_feature: Ceres CLONE ID no. 1626129
  misc_feature: Ceres CDNA ID no. 40352063
  misc_feature (70)..(154): Pfam Name: Glutaredoxin PFAM Desc: Glutaredoxin
MATSLSNMFLKGIAARSLSRPLNGLFYCTRYSTTVSNDSDTHDDFKPANKLENSGISLSNVIEQDVKDNPVMVYMKGVPDFPQCGFSSLAVRVLKHYDVPISARNILDDPDLKNAVKAFGNWPTFPQIFIKGEFIGGSDIVLNMHQTGELKEKLKDITSKQ

SEQ ID NO: 10385 - DNA, 757 bp, Glycine max
  misc_feature: Ceres CLONE ID no. 1626152
  misc_feature: Ceres CDNA ID no. 25446758
  CDS (83)..(580): REFERENCED BY SEQ ID NO: 10386
atcccgggtctaggttttctctctcgtccactcgcagattcaaacatttgggaggctgaggcatctctctctgttttctagaatgggagctgggcgtgaagtctccatctcacttgatggagtgagggacaagaaccttatgcagctcaaaaagctcaatctcgctcttttccctgttcgttacaatgacaaatactataccgatgcactcgcttccggtgaattcaccaaactagcttactatagtgatatttgtgttggagcgattgcgtgccggctggagaagaaagaaggtggggggcaagttcgggtttacatcatgacattaggtgttttagcaccttaccgtggacttggtattggaacaaggcttttgaatcatgttcttgatctttgctccaagcaaaacatttctgaggtttacttgcatgtgcagacaaacaatgaggatgccataaacttctataagaaatttggatttgaaattacagaaacaatccagaactattatacaaacattacaccgcctgactgctatgttctcacgaggtatactgttctaagcacaacgaagaaataacatttcagattttgaggggaagtaatcagagattgttgcattgttttatgggttttgccatggatgtattacactaaggttttttatgtccaatgctagattttaaacagcaaagttagctaaaaaaaaaaaggaagcacttggaaaaaaaaaaaaaaaaaaaaaaaaaaaaaaaaa

SEQ ID NO: 10386 - protein, 165 aa, Glycine max; identical to SEQ ID NO: 10328
  misc_feature: Ceres CLONE ID no. 1626152
  misc_feature: Ceres CDNA ID no. 25446758
  misc_feature (50)..(134): Pfam Name: Acetyltransf_1 PFAM Desc: Acetyltransferase
  misc_feature: Homolog of GI Number: 28416617 NR Desc: At5g11340
  misc_feature: Homolog of GI Number: 53791479 NR Desc: Mak3 protein
  misc_feature: Homolog of GI Number: 49116762 NR Desc: MGC80671 protein
  misc_feature: Homolog of GI Number: 57109540 NR Desc:  similar to Mak3 homolog
  misc_feature: Homolog of GI Number: 34785642 NR Desc: Mak3p homolog
  misc_feature: Homolog of GI Number: 74002728 NR Desc:  similar to Mak3 homolog
  misc_feature: Homolog of GI Number: 72086689 NR Desc:  similar to Mak3p homolog
  misc_feature: Homolog of GI Number: 55242198 NR Desc: ENSANGP00000026145
  misc_feature: Homolog of GI Number: 72032023 NR Desc:  similar to CG12352
  misc_feature: Useful for increasing chlorophyll and photosynthetic capacity
  misc_feature: Useful for making plants with increased biomass and foliage

SEQ ID NO: 10387 - DNA, 740 bp, Glycine max
  misc_feature: Ceres CLONE ID no. 1626254
  misc_feature: Ceres CDNA ID no. 29191338
  CDS (43)..(498): REFERENCED BY SEQ ID NO: 10388
acgaaccgccagtcacgtcaagaatccctcaaatccgccaacatgcctcccaagcagaaggtcgcccgcgctccccaggagaacatccaactcggaccccaggtccgcgagggtgagcttgtcttcggtgttgcccgtatcttcgcttccttcaacgacaccttcgtccacatcaccgatctttctggccgcgaaaccatctcccgtgtcactggtggcatgaaggtcaaggccgaccgtgacgagagctctccctacgccgccatgttggcagcccaggatgttgctgctcgctgcaaggaactcggtatcaccgctctccacgtcaagatccgagccaccggtggtaacggcaccaagacccccggccccggtgcccagtccgctcttcgcgctcttgcccgcgctggcatgcgcattggacgtatcgaggacgttacccccaccccatccgactccaccagaaggaagggtggtcgccgtggtcgtcgtctctgagcatgtgcgcaagttttttgctcagtggtgggatatggcatggcatggtatgcacgatttatggtttaatgaccacaatcaaataaagtcgcggggaacggcgaatcgcctggtctccttgttgaacttggcttctcctgcgagatagtcgagcgaaatcaacagaatcctttttagttcgaaaaggtttcccgacaatgaagtgcttactgctgtgttgctcaaaaaaaaaaaaaaaaaaa

SEQ ID NO: 10388 - protein, 151 aa, Glycine max
  misc_feature: Ceres CLONE ID no. 1626254
  misc_feature: Ceres CDNA ID no. 29191338
  misc_feature: The plant is abnormally large.
  misc_feature: Useful for making plants with modulated biomass
  misc_feature (29)..(147): Pfam Name: Ribosomal_S11 PFAM Desc: Ribosomal protein S11
  misc_feature: Homolog of GI Number: 42544928 NR Desc: RS14_NEUCR 40S ribosomal protein S14
  misc_feature: Homolog of GI Number: 32416116 NR Desc: 40S RIBOSOMAL PROTEIN S14
  misc_feature: Homolog of GI Number: 14140107 NR Desc: ribosomal protein crp
  misc_feature: Homolog of GI Number: 66853015 NR Desc: ribosomal protein S14.e
  misc_feature: Homolog of GI Number: 67539580 NR Desc: 40S ribosomal protein S14
  misc_feature: Homolog of GI Number: 463857 NR Desc: ribosomal protein S14
  misc_feature: Homolog of GI Number: 57227476 NR Desc: structural constituent of ribosome
  misc_feature: Homolog of GI Number: 61654728 NR Desc: S14
  misc_feature: Homolog of GI Number: 50755035 NR Desc:  similar to ribosomal protein S14
  misc_feature: Homolog of GI Number: 65303942 NR Desc: 40S ribosomal protein S11
  misc_feature: Useful for decreasing plant size
  misc_feature: Useful for making larger plants
  misc_feature: Useful for making ornamental plants with modified flowers
  misc_feature: Useful for making plants with altered leaf shape eg curled leaves
  misc_feature: Useful for sterility
MPPKQKVARAPQENIQLGPQVREGELVFGVARIFASFNDTFVHITDLSGRETISRVTGGMKVKADRDESSPYAAMLAAQDVAARCKELGITALHVKIRATGGNGTKTPGPGAQSALRALARAGMRIGRIEDVTPTPSDSTRRKGGRRGRRL

SEQ ID NO: 10389 - DNA, 637 bp, Glycine max
  misc_feature: Ceres CLONE ID no. 1626345
  misc_feature: Ceres CDNA ID no. 29191617
  CDS (68)..(487): REFERENCED BY SEQ ID NO: 10390
cttaacctctctgctgcgtttgcttctcctccacccatccacaaacgaacacacactttgattgagaatggggcgtgttcgcacaaagacagtgaagaagtcctcgcggcaagtgatcgagaggtactactctcgcatgacgctggacttccacactaacaagaaggttctggaagaggtggccatcattccctccaagaggctccgcaacaagatcgcgggattctccacccacctcatgaagcggatccagaagggtcccgtacgtggaatctccctcaagctgcaggaggaggagcgcgagcgccgcatggacttcgtccccgatgtctccgccatcagaaccgaccagatcgaggtcgacaaggagacgctcgacatgctcgccgccctcggaatgtccgaggttcccggggttgttcaggtggatcctgttgctgtccaggcaccgctcggcttcggccgcggcgccggaaggaggtactagttgccgcctttgagagttttggccgtgttgtttactagagcactaatttgttatgcgttgaagtttggttttacattagttttggattgttggactcgttaaagttgttaatggaatttgttttgttttgcttaaaaaaaaaaaaaaaaa

SEQ ID NO: 10390 - protein, 139 aa, Glycine max; identical to SEQ ID NO: 3496
  misc_feature: Ceres CLONE ID no. 1626345
  misc_feature: Ceres CDNA ID no. 29191617
  misc_feature (2)..(122): Pfam Name: Ribosomal_S17e PFAM Desc: Ribosomal S17
  misc_feature: Homolog of GI Number: 40287504 NR Desc: 40S ribosomal protein S17
  misc_feature: Homolog of GI Number: 76573345 NR Desc: 40S ribosomal protein S17
  misc_feature: Homolog of GI Number: 5758304 NR Desc: 40S ribosomal protein S17
  misc_feature: Homolog of GI Number: 23507769 NR Desc: At5g04800/MUK11_12
  misc_feature: Homolog of GI Number: 21595522 NR Desc: 40S ribosomal protein S17
  misc_feature: Homolog of GI Number: 25295117 NR Desc: 40S ribosomal protein S17
  misc_feature: Homolog of GI Number: 21593447 NR Desc: 40S ribosomal protein S17
  misc_feature: Homolog of GI Number: 30102846 NR Desc: At2g05220
  misc_feature: Homolog of GI Number: 8567795 NR Desc: 40S ribosomal protein S17
  misc_feature: Homolog of GI Number: 50916209 NR Desc: Putative 40S ribosomal protein S17

SEQ ID NO: 10391 - DNA, 805 bp, Glycine max
  misc_feature: Ceres CLONE ID no. 1626364
  misc_feature: Ceres CDNA ID no. 35383490
  CDS (131)..(610): REFERENCED BY SEQ ID NO: 10392
gcccagcatccgaactgaagcggatacctcgtttgtgcgccagttccagtgtgtgcaaagtgcagtgatagaaagctagctcgctagctagggttagggttagggttagggtttctgcgtttatgcgaagatgactaagttcaggaaattgggtcgacccaccggtcaccgaatgtccatgctcagaaccatggtctcgcagttggtgaagcacgagcgcatcgaaactactgtcgccaaggcgaaagagatcagaagactcgcggataatatggtgcagcttggaaaggagggatcccaacatgctgcgagacgtgctgctagttttgtgcgaggagatgatgtccttcacaagctgtttacagaactggcttatcggtacaaggatagagctggaggatacaccagattgcttcggacccgtattcgagtgggtgatgctgcaccgatggcctatattgagtttattgacagagaaaatgagcttaggcaggcaaaggcaccaactcctcagccaccacagagagcaccccttgatccctgggcacgttctcgtctcagcaggcaatttgcacctcctaaagaggataaatctggatctgatttgtgattctattaatgctgtactgtgtttttctccccatagcgtgagatatctgaatattgattttgcttattgaatctatctacacatggtttgaaaaataaaactattctctgcttttctactagaggaaaatattcattgatgtgtaaaaataattcgaccgaatcttgtaattgagaaaaaaaaaaaaaaaaaaaa

SEQ ID NO: 10392 - protein, 159 aa, Glycine max
  misc_feature: Ceres CLONE ID no. 1626364
  misc_feature: Ceres CDNA ID no. 35383490
  misc_feature (17)..(113): Pfam Name: Ribosomal_L17 PFAM Desc: Ribosomal protein L17
  misc_feature: Homolog of GI Number: 21592350 NR Desc: ribsomal protein
  misc_feature: Homolog of GI Number: 18424850 NR Desc: ribosomal protein L17 family protein
  misc_feature: Homolog of GI Number: 21555473 NR Desc: 50S ribosomal protein L17
  misc_feature: Homolog of GI Number: 7671412 NR Desc: ribsomal protein
  misc_feature: Homolog of GI Number: 10178068 NR Desc: 50S ribosomal protein L17
  misc_feature: Homolog of GI Number: 72384434 NR Desc: 52O08_5
  misc_feature: Homolog of GI Number: 56784661 NR Desc: putative 50S ribosomal protein L17
  misc_feature: Homolog of GI Number: 26451578 NR Desc: putative 50S ribosomal protein L17
  misc_feature: Homolog of GI Number: 50931683 NR Desc: putative 50S ribsomal protein L17
  misc_feature: Homolog of GI Number: 9759008 NR Desc: 50S ribosomal protein L17
MTKFRKLGRPTGHRMSMLRTMVSQLVKHERIETTVAKAKEIRRLADNMVQLGKEGSQHAARRAASFVRGDDVLHKLFTELAYRYKDRAGGYTRLLRTRIRVGDAAPMAYIEFIDRENELRQAKAPTPQPPQRAPLDPWARSRLSRQFAPPKEDKSGSDL

SEQ ID NO: 10393 - DNA, 628 bp, Glycine max
  misc_feature: Ceres CLONE ID no. 1626383
  misc_feature: Ceres CDNA ID no. 25446094
  CDS (84)..(431): REFERENCED BY SEQ ID NO: 10394
acgactcacacattgcttctgctaaccctctctgggctctccactgaactgagtctgaagaggaaaacatttaactaactgcaatggctgcacgtgtggctgcaaggtacggatctagaaggctatttagcagtggttctggaaaaatactgagcgaggaggaaaaggctgcagaaaatgcttactttaagaaagctgagcaagagaagttggagaagcttgctcgcaagggtcctcaacccgaagcaggctcggggggttcagtaactgatgccaaacctagtagctcaggacatgctggaacaacagccgacagagtttcaactgacaagtaccggaattatgcagttgtagctggtactgtaacaattcttggggctttggggtggtaccttaaaggcactgcaaagaagccagaagtgcaggattgaacatttcagctgtgcatgttctcattttgttattggttgcagcaattgcacaaaaataaatgaccaaactactaactcttttcattccatctgactatcatcatgaattactcctttaatgtttcatgatttacatattaccctatatattctcgatgctatttagcatgacgaacatcaaaaaaaaaaaaaaaaaa

SEQ ID NO: 10394 - protein, 115 aa, Glycine max
  misc_feature: Ceres CLONE ID no. 1626383
  misc_feature: Ceres CDNA ID no. 25446094
  misc_feature: Homolog of GI Number: 52077175 NR Desc: F1F0
  misc_feature: Homolog of GI Number: 21592886 NR Desc: F1F0
  misc_feature: Homolog of GI Number: 50948471 NR Desc: putative F1F0
  misc_feature: Homolog of GI Number: 50948469 NR Desc: putative F1F0
MAARVAARYGSRRLFSSGSGKILSEEEKAAENAYFKKAEQEKLEKLARKGPQPEAGSGGSVTDAKPSSSGHAGTTADRVSTDKYRNYAVVAGTVTILGALGWYLKGTAKKPEVQD

SEQ ID NO: 10395 - DNA, 670 bp, Glycine max
  misc_feature: Ceres CLONE ID no. 1626390
  misc_feature: Ceres CDNA ID no. 29191618
  CDS (97)..(555): REFERENCED BY SEQ ID NO: 10396
agtacagaacgcggtaaccctagaatcccaaatccccaatcaatcgaccaagagcaggagcttcggtggcgatcttcatccgcctcggtgaaaaaaatgtctctggtggcgaacgaggatttccagcacattctgcgtgtgctgaacaccaacgtagatgggaagcagaagataatgttcgctctcacctctatcaaaggtattggcaggcgattcgctaacatttgctgcaaaaaagctgatgtcgacatgaacaagagagctggtgaattgagtgctattgagttggatagcgttatgactgtggttgccaaccctcggcaattcaagatcccggattggtttttgaataggaagaaagactacaaggatgggaagtattctcaggtggtgtcaaatgcactggatatgaagttgagggatgatttggagcgcttgaagaaaatcagaaatcaccgtggtttgaggcactactggggtcttcgtgttcgtggtcagcacactaagactactggtcgcaggggtaaaactgttggtgtctctaagaagcgttaagctgtgttatatgtttgctttgagaaatagatatttgttagggaagcaaattttgaattatgttggacaagtttccatagaacataaattttattggtaaaaaaaaaaaaaaaaa

SEQ ID NO: 10396 - protein, 152 aa, Glycine max
  misc_feature: Ceres CLONE ID no. 1626390
  misc_feature: Ceres CDNA ID no. 29191618
  misc_feature (14)..(142): Pfam Name: Ribosomal_S13 PFAM Desc: Ribosomal protein S13/S18
  misc_feature: Homolog of GI Number: 56236126 NR Desc: At1g22780
  misc_feature: Homolog of GI Number: 17978783 NR Desc: S18.A ribosomal protein
  misc_feature: Homolog of GI Number: 40287492 NR Desc: putative ribosomal protein
  misc_feature: Homolog of GI Number: 50919149 NR Desc: putative ribosomal protein S18A
  misc_feature: Homolog of GI Number: 22204120 NR Desc: putative ribosomal protein S18
  misc_feature: Homolog of GI Number: 50934523 NR Desc: putative ribosomal protein S18
  misc_feature: Homolog of GI Number: 24266988 NR Desc: ribosomal protein S18
  misc_feature: Homolog of GI Number: 22758908 NR Desc: ribosomal protein S18
  misc_feature: Homolog of GI Number: 71040621 NR Desc: ribosomal protein S18
MSLVANEDFQHILRVLNTNVDGKQKIMFALTSIKGIGRRFANICCKKADVDMNKRAGELSAIELDSVMTVVANPRQFKIPDWFLNRKKDYKDGKYSQVVSNALDMKLRDDLERLKKIRNHRGLRHYWGLRVRGQHTKTTGRRGKTVGVSKKR

SEQ ID NO: 10397 - DNA, 862 bp, Glycine max
  misc_feature: Ceres CLONE ID no. 1626425
  misc_feature: Ceres CDNA ID no. 25402501
  CDS (56)..(553): REFERENCED BY SEQ ID NO: 10398
cattttcgtggcattcctctctctcgtgtcgggtgaagggaaaaatcaaatcaacatgctgagagtgggcgcaaagagggttttggaaacgacgttgtttggggttagggttccggcgaggctgtaccacgagagggttgtggatcactacgacaacccccggaacgttggatcgtttgacaagaacgacccgagcgtggggacgggtttggtgggggccccggcgtgcggcgatgtgatgaagctccagattaaggtcgacgacaaaaccggaaaaatcgtcgatgctcgattcaaaactttcggctgtggctccgccattgcttcttcctccgtcgctactgagtgggtgaagggaaggcaaatggaggaagttctgactataaaaaatactgaaattgcaaagcatctttcacttccaccagttaagctccactgcagcatgcttgctgaagatgctatcaaagcggccgttaaagactatgaagctaagcgtgctaaggcaactgctagcggagaggcagcaacagaagagaagcctgccactgcatgatttctttcatatatagaaagaatgatgacgaaaacaaccgtttgtttgtttgtttattcttaatcagtttcttatcgaagagcaccttcacttgagactttgggttggacttagctggagagtattcacattctgtgaactaaatatttgaaatgccagctatggtttgttatcttctcggtttgtatttagtagtactgcattattaaatgtgtaagaatgctataaagcagatttgaatgtttgaaagttccccaatacaattaagtgaatagcatgatattttcacaaaaaaaaaaaaaaaaaaaa

SEQ ID NO: 10398 - protein, 165 aa, Glycine max
  misc_feature: Ceres CLONE ID no. 1626425
  misc_feature: Ceres CDNA ID no. 25402501
  misc_feature (23)..(150): Pfam Name: NifU_N PFAM Desc: NifU
  misc_feature: Homolog of GI Number: 19548021 NR Desc: AT4g22220/T10I14_50
  misc_feature: Homolog of GI Number: 21595581 NR Desc: nifU
  misc_feature: Homolog of GI Number: 34912076 NR Desc: putative nifU
  misc_feature: Homolog of GI Number: 51854290 NR Desc: putative nifU
  misc_feature: Homolog of GI Number: 16798388 NR Desc: iron
  misc_feature: Homolog of GI Number: 7267164 NR Desc: putative NifU
  misc_feature: Homolog of GI Number: 82937835 NR Desc: Fe
  misc_feature: Homolog of GI Number: 61873066 NR Desc:  similar to iron
  misc_feature: Homolog of GI Number: 55638805 NR Desc:  similar to ISCU2
  misc_feature: Homolog of GI Number: 56699456 NR Desc: iron
MLRVGAKRVLETTLFGVRVPARLYHERVVDHYDNPRNVGSFDKNDPSVGTGLVGAPACGDVMKLQIKVDDKTGKIVDARFKTFGCGSAIASSSVATEWVKGRQMEEVLTIKNTEIAKHLSLPPVKLHCSMLAEDAIKAAVKDYEAKRAKATASGEAATEEKPATA

SEQ ID NO: 10399 - DNA, 674 bp, Glycine max
  misc_feature: Ceres CLONE ID no. 1626458
  misc_feature: Ceres CDNA ID no. 36707447
  CDS (84)..(494): REFERENCED BY SEQ ID NO: 10400
acaccttcgaattttcttttccttcactttcccgagaaaaaaaaaaccctctttcactttcttgactacggtctcacttcgacatggctcgaactaagcaaactgctcgcaagtccaccggcggcaaggcgccacgtaagcagttggcgaccaaggccgcccggaagtccgctcccgcgaccggaggagtgaagaagccccaccgcttcaggccgggaaccgtggcgctgagggaaatcagaaagtatcagaagagcaccgagcttctcatcaggaagcttccgtttcagagactcgtgagggaaatcgcgcaggacttcaagaccgatttgcgttttcagagtagcgccgtttctgcgcttcaggaagctgctgaggcctacctcgttgggttgttcgaggacactaacctttgcgcgattcatgcaaagagggttaccattatgcctaaggatattcagcttgctcgcaggatcagaggcgagagggcttaggttggttagggttctgattttgaaggaggcgagacggcttagaaaaagaatcatctatctatgtgtttatgtgggcatgtgaaacgtgaatctgtttgcttttgtaattatctcgtgtttcttagacaagttaattaaaatgctatgttggttctcggagaaaaaaaaaaaaaaaaaaaa

SEQ ID NO: 10400 - protein, 136 aa, Glycine max; identical to SEQ ID NO: 588
  misc_feature: Ceres CLONE ID no. 1626458
  misc_feature: Ceres CDNA ID no. 36707447
  misc_feature (58)..(134): Pfam Name: Histone PFAM Desc: Core histone H2A/H2B/H3/H4
  misc_feature: Homolog of GI Number: 59799581 NR Desc: Histone H3
  misc_feature: Homolog of GI Number: 166384 NR Desc: histone H3
  misc_feature: Homolog of GI Number: 57098927 NR Desc:  similar to histone protein Hist2h3c1
  misc_feature: Homolog of GI Number: 72093532 NR Desc:  similar to H3 histone
  misc_feature: Homolog of GI Number: 1362108 NR Desc: histone H3 homolog
  misc_feature: Homolog of GI Number: 76612873 NR Desc:  similar to H3 histone
  misc_feature: Homolog of GI Number: 76612880 NR Desc:  similar to H3 histone
  misc_feature: Homolog of GI Number: 76732189 NR Desc:  similar to H3 histone
  misc_feature: Homolog of GI Number: 30061401 NR Desc: H3 histone
  misc_feature: Homolog of GI Number: 55775689 NR Desc: histone 3

SEQ ID NO: 10401 - DNA, 1024 bp, Glycine max
  misc_feature: Ceres CLONE ID no. 1626468
  misc_feature: Ceres CDNA ID no. 40041512
  CDS (53)..(844): REFERENCED BY SEQ ID NO: 10402
atctttccttttccgccgttcctaaccctacaagcttcgtctcgtaaagaaaatgaggacagtgctttcgcgcttgatccattccacgccttccatttccaggatcaatgcagtgtcaatccgcgggagagatctcttctttccaaatgtctgctttaaagttgaagaagcagttaatgtgcctccacccccaacggaaaaggttgttctgtttggaggcgattggtttgttggatcacacttttttagagaagccctagaacgtggcatgtctgctgggagtcctagcaggtctggtaggtcatccctgcatgattcctgggctaggaattttgcttggtatcaagggaatctcttttcaactgcttcattgagaaaacatctgaatggggccactgctgttatctcatttatgggtggttttggctccaacatcaaagctattagagcagcttcagatcaaggtgttaaaagatttgtctatatctctgctgctgaatgtggtgtagtaaatgacttactgcagggctataatataggaaagagagctgctgaaacagagcttctgaacagatttccatttggaggagtaattctgaggccaggatttttatatgggccaggatttttttatgggcctcgaagtgttgcatctccattggaaatggttctccaagttgctaaaccatcgaaccagatcccacttgttgggcctctgttgacacctcctgtcagtgttactgcggtggcaaaagttgctgttacagctgctactgctactgatcctgtatttcccccggggatcattgatgcctatggaatacgacgtttactgtcagaataaatcaaactagaattatctttcttttgttttctgggtaaatctaatttggggcgatttgcttctgaatatccgtgttttactattattgttaaactgagaatatttctccataccaaatccttgaaagaataaaatctgaaagtgcgtgcgtgcatgtagcaaaaaaaaaaaaaaaaaaaa

SEQ ID NO: 10402 - protein, 263 aa, Glycine max
  misc_feature: Ceres CLONE ID no. 1626468
  misc_feature: Ceres CDNA ID no. 40041512
  misc_feature (51)..(255): Pfam Name: Epimerase PFAM Desc: NAD dependent epimerase/dehydratase family
  misc_feature: Homolog of GI Number: 50909435 NR Desc: dehydrogenase
  misc_feature: Homolog of GI Number: 50924037 NR Desc: OSJNBb0118P14.7
MRTVLSRLIHSTPSISRINAVSIRGRDLFFPNVCFKVEEAVNVPPPPTEKVVLFGGDWFVGSHFFREALERGMSAGSPSRSGRSSLHDSWARNFAWYQGNLFSTASLRKHLNGATAVISFMGGFGSNIKAIRAASDQGVKRFVYISAAECGVVNDLLQGYNIGKRAAETELLNRFPFGGVILRPGFLYGPGFFYGPRSVASPLEMVLQVAKPSNQIPLVGPLLTPPVSVTAVAKVAVTAATATDPVFPPGIIDAYGIRRLLSE

SEQ ID NO: 10403 - DNA, 837 bp, Glycine max
  misc_feature: Ceres CLONE ID no. 1626487
  misc_feature: Ceres CDNA ID no. 29191351
  CDS (32)..(670): REFERENCED BY SEQ ID NO: 10404
aagcttagcttcaccgtcagttgcaggaaaaatggtttcgctgaaactgcagaagcggctcgcagccagcgtcctcaagtgtggcagaggaaaggtttggcttgaccccaatgaagtcaacgaaatctccatggctaattctcgccaaaacataaggaagctggttaaggatgggtttattatcaggaagcccaccaagattcactctcgctcacgtgcccgccgaatgaaggaagccaagaggaaaggacgtcactctggatatggtaagcgtaagggtacaagggaggcaaggcttcccactaaaatcctttggatgaggagaatgcgtgtgcttagacgcttgcttcgcaaatacagggaatctaagaagattgacaagcacatgtatcatgacatgtacatgaaggtcaagggtaacgttttcaagaacaaaagagttttaatggagagcattcataagtccaaagccgagaaggcaagagagaagaccttgtccgatcaatttgaggccaaacgtgccaagaacaaggccagcagagaaagaaaaattgctcggagggaggagcgattggcccaaggtcctggagaaaaagtatccgctgcacccagtgctacagctgctacagcatcacagccagcgcaagcaccaaagaaatctaagaagtgatccacatattctgatattggcttgtagaatttttgggtctggcattttgagttgctgttctaaagtagttttgacgagttttgaggagtttgtgttggtttagacctttagtttttatttaagtatatgaaattataacattctgttaaaaaaaaaaaaaaaaaaaa

SEQ ID NO: 10404 - protein, 212 aa, Glycine max
  misc_feature: Ceres CLONE ID no. 1626487
  misc_feature: Ceres CDNA ID no. 29191351
  misc_feature (2)..(149): Pfam Name: Ribosomal_L19e PFAM Desc: Ribosomal protein L19e
  misc_feature: Homolog of GI Number: 40287526 NR Desc: 60S ribosomal protein L19
  misc_feature: Homolog of GI Number: 83284003 NR Desc: 60S ribosomal protein L19
  misc_feature: Homolog of GI Number: 33589762 NR Desc: At1g02780/T14P4_3
  misc_feature: Homolog of GI Number: 29837764 NR Desc: putative ribosomal protein L19
  misc_feature: Homolog of GI Number: 18087585 NR Desc: At1g02780/T14P4_3
  misc_feature: Homolog of GI Number: 47026900 NR Desc: ribosomal protein L19
  misc_feature: Homolog of GI Number: 7268983 NR Desc: putative ribosomal protein L19
  misc_feature: Homolog of GI Number: 19699260 NR Desc: AT3g16780/MGL6_23
  misc_feature: Homolog of GI Number: 32401377 NR Desc: ribosomal protein L19
  misc_feature: Homolog of GI Number: 3377797 NR Desc: Similar to 60S ribosome protein L19
MVSLKLQKRLAASVLKCGRGKVWLDPNEVNEISMANSRQNIRKLVKDGFIIRKPTKIHSRSRARRMKEAKRKGRHSGYGKRKGTREARLPTKILWMRRMRVLRRLLRKYRESKKIDKHMYHDMYMKVKGNVFKNKRVLMESIHKSKAEKAREKTLSDQFEAKRAKNKASRERKIARREERLAQGPGEKVSAAPSATAATASQPAQAPKKSKK

SEQ ID NO: 10405 - DNA, 898 bp, Glycine max
  misc_feature: Ceres CLONE ID no. 1626531
  misc_feature: Ceres CDNA ID no. 25402502
  CDS (93)..(671): REFERENCED BY SEQ ID NO: 10406
acatcagtcactagtgtgtgaaaagcgacacaacacaacataagctttattcttttttcttcgcttcttctgtacagcacccaagattgaagatgatagaccttgcgcgcgtgcagaaggagctcgtggaatgcagcaaggacgcggagggatcgggcatcaaagtctgccccaaaagcgacaaccttgttctcttgatcggcaccattcctggccctgtcggaactccttatgaagggggcattttccagattgatatcacattgccagatgggtacccgtttgaaccccccaagatgaagtttaaaaccaaagtttggcatcctaatatcagcagccaaagtggagctatttgcctggatatcttgaaggaccagtggagcccagcactcactctgaagactgcacttctttctgtgcaagcacttctctctgctccacagcctgatgatcctcaagatgccgtggtggcacagcagtatctgaaagactatcagacatttgttaacactgctcgctactggacagaaagttttgccaaggaatcgtctcgcgggattgaagacaaggtacagaaactcgttgagatgggatttccagaagctcaagtaaggagcattttggaagctgttggtggtgatgaaaacttggctcttgaaaggttgctgtagatcatggtcaagtttaggatgacatgtctccataatatgatggaaccatatagacaaaaagtttaaattgaatatagagtcatataaatctacttggcacatcgtatagtccttttgttttactctgccttttttttctccttggatactacggtactcgactatttcctagtgattatatccgttatgaaattaaataccttattgccaaaaaaaaaaaaaaaaaa

SEQ ID NO: 10406 - protein, 192 aa, Glycine max
  misc_feature: Ceres CLONE ID no. 1626531
  misc_feature: Ceres CDNA ID no. 25402502
  misc_feature (155)..(192): Pfam Name: UBA PFAM Desc: UBA/TS
  misc_feature (6)..(145): Pfam Name: UQ_con PFAM Desc: Ubiquitin
  misc_feature: Homolog of GI Number: 886679 NR Desc: ubiquitin conjugating enzyme
  misc_feature: Homolog of GI Number: 82621188 NR Desc: ubiquitin
  misc_feature: Homolog of GI Number: 82623381 NR Desc: ubiquitin conjugating enzyme
  misc_feature: Homolog of GI Number: 20465331 NR Desc: putative ubiquitin
  misc_feature: Homolog of GI Number: 50904373 NR Desc: putative ubiquitin conjugating enzyme
  misc_feature: Homolog of GI Number: 46226754 NR Desc: Ubc1p like ubiquitin
  misc_feature: Homolog of GI Number: 23619484 NR Desc: ubiquitin
  misc_feature: Homolog of GI Number: 65305042 NR Desc: ubiquitin conjugating enzyme
  misc_feature: Homolog of GI Number: 23487093 NR Desc: ubiquitin conjugating enzyme
  misc_feature: Homolog of GI Number: 56493724 NR Desc: ubiquitin
MIDLARVQKELVECSKDAEGSGIKVCPKSDNLVLLIGTIPGPVGTPYEGGIFQIDITLPDGYPFEPPKMKFKTKVWHPNISSQSGAICLDILKDQWSPALTLKTALLSVQALLSAPQPDDPQDAVVAQQYLKDYQTFVNTARYWTESFAKESSRGIEDKVQKLVEMGFPEAQVRSILEAVGGDENLALERLL

SEQ ID NO: 10407 - DNA, 835 bp, Glycine max
  misc_feature: Ceres CLONE ID no. 1626553
  misc_feature: Ceres CDNA ID no. 25402504
  CDS (123)..(536): REFERENCED BY SEQ ID NO: 10408
gctggataaacttgtatttctctccttaaaacccgacctcgacgtttgcctctctcagtctcagtctcagtttcagtttcggatctctctcttctttcacaccaatttccagcatttgaaacatggcagattcaaaatcaggattgaggaaaccagtgttcaccaaggttgatcagctttgcccggggaccagtggtcacactttaactgtgaaggtggtcaatgctaagatggtgatgcagagaggtcgctctgatggtcctcaatctcgtcaaatgcgaattgctgagtgcttggttggtgatgagactggaatgatcatatacaccgccagaaatgatcaagtggatacgatgacagagggagctactgtgatcctgcgtaacgccaaaattgacatgttcaaaggatcaatgaggcttgctgtggacaagtggggccgtgtggaactcacagaacctgctagtttcactgtgaaggaagataataacttgtctctcattgagtatgaactggtgaatgttgttgcggaatgacttattgggaatcctggaatttcttttgagaataaaacaaatccagcgaagaaatcttttgttttttgtctgagacatctcatcatgcccatcacattcaccttagtttaggaatagagatttgagcagctagtagtgccaacagttgcttcttacttttgcaacagactctggatcttgtagcttaaccactgaacagatggtcgctgtaattgcaacaagaaaatgggaattggcttccagatcatatgctttttgttatgctatctattgacaattttagaaaaaaaaaaaaaaaa

SEQ ID NO: 10408 - protein, 137 aa, Glycine max
  misc_feature: Ceres CLONE ID no. 1626553
  misc_feature: Ceres CDNA ID no. 25402504
  misc_feature: null
  misc_feature: Useful for making plants with modulated drought sensitivity
  misc_feature: Homolog of GI Number: 5091555 NR Desc: T10O24.24
  misc_feature: Homolog of GI Number: 6573753 NR Desc: F20B24.1
  misc_feature: Homolog of GI Number: 34904470 NR Desc: OSJNBa0086P08.14
  misc_feature: Homolog of GI Number: 57900332 NR Desc: DNA
  misc_feature: Homolog of GI Number: 34909622 NR Desc: P0435B05.31
  misc_feature: Homolog of GI Number: 25329540 NR Desc: probable tyrosyl
MADSKSGLRKPVFTKVDQLCPGTSGHTLTVKVVNAKMVMQRGRSDGPQSRQMRIAECLVGDETGMIIYTARNDQVDTMTEGATVILRNAKIDMFKGSMRLAVDKWGRVELTEPASFTVKEDNNLSLIEYELVNVVAE

SEQ ID NO: 10409 - DNA, 835 bp, Glycine max
  misc_feature: Ceres CLONE ID no. 1626583
  misc_feature: Ceres CDNA ID no. 25402505
  CDS (59)..(568): REFERENCED BY SEQ ID NO: 10410
agtacattttcctctgaaccaaaccctcatccaaattaaccagcaagcggtattcacaatgggaaaagctgcaatcatcatccttgcctccaccctttgcttcttatccttcctaggctctgcttatgcccgagaccgcttcatggtggagggcaccgtttactgtgacacatgtcgcgtccaattcctcaccaagttgtccgagatccttgaaggtgctacggtgcgtgtgacgtgctcacaagttgataatgcgaagaacgtgacattcagcaaagaggcagtgacagatgcttcggggtcatacaaagtggaagtggagggagaccacgaggaagacacgtgcgaggtaacccttctgaagagtccaaggccagactgctcggagattgaccgagagtctcacctgcaacaggctgccagaatcagcatcaccaaaaacaatggaatagtgtcccctcttcgccaagccaaccctcttggtttcctcaagaaggaccgtctccctggctgcgctgacctcctcaaggagcttggaatcaacgaagatggcactctctccgtttgaacaacaatacattaatgggatatagctatcgtatatccctcttttgttaattagctatctaaggagctagggctcaatcttctccttttcctctttttttatattttaggatcaagatgtgagtattaataatgcgtatgagctcgtgccttaggggggaagtttttttctagacttttatcaaatctctcaaaggatcctcggccttgtacaactctcacattttcttatttgctggagttaatcattactaaaaaaaaaaaaaaa

SEQ ID NO: 10410 - protein, 169 aa, Glycine max
  misc_feature: Ceres CLONE ID no. 1626583
  misc_feature: Ceres CDNA ID no. 25402505
  misc_feature (30)..(154): Pfam Name: Pollen_Ole_e_I PFAM Desc: Pollen proteins Ole e I family
  misc_feature: Homolog of GI Number: 2765366 NR Desc: putative Ole e 1 protein
  misc_feature: Homolog of GI Number: 22074346 NR Desc: Che a 1 allergen precursor
  misc_feature: Homolog of GI Number: 44681468 NR Desc: At4g18596
  misc_feature: Homolog of GI Number: 21593871 NR Desc: Ole e I
  misc_feature: Homolog of GI Number: 51969838 NR Desc: Ole e I
  misc_feature: Homolog of GI Number: 9758935 NR Desc: Ole e I
  misc_feature: Homolog of GI Number: 295812 NR Desc: LAT52
  misc_feature: Homolog of GI Number: 25990491 NR Desc: LLP
  misc_feature: Homolog of GI Number: 72384479 NR Desc: 80A08_10
  misc_feature: Homolog of GI Number: 72384412 NR Desc: 4D11_14
  misc_feature: Useful for sterility
MGKAAIIILASTLCFLSFLGSAYARDRFMVEGTVYCDTCRVQFLTKLSEILEGATVRVTCSQVDNAKNVTFSKEAVTDASGSYKVEVEGDHEEDTCEVTLLKSPRPDCSEIDRESHLQQAARISITKNNGIVSPLRQANPLGFLKKDRLPGCADLLKELGINEDGTLSV

SEQ ID NO: 10411 - DNA, 591 bp, Glycine max
  misc_feature: Ceres CLONE ID no. 1626584
  misc_feature: Ceres CDNA ID no. 36706986
  CDS (61)..(393): REFERENCED BY SEQ ID NO: 10412
aattgctattctctctctttcacagcacactcctcccagggtttctccaccaagagggaaatggctcccaaaccgcctagtacgggtctgtttgttggactgaacaagggacatgtcgtcaccaagaaggaattgcccccacgcccctcggatcgtaaggggaaaacaagcaagagggtgcactttgtgaggaacctcataagagaggttgctggttttgcaccctatgaaaagcgtataactgagttgctgaaggttgggaaggataagagggcacttaaggttgcaaagagaaagcttggaacccacaaacgtgcaaagaagaagcgtgaggaaatgtccaatgttcttaggaagatgagggctggtggggctggagacaagaagaaataagtcttatttactcttttctagtttcactagatggacctgtgtattgatggacgaactttcatatttttgctttggatcaattagtttacttcaacattttgtttgagaaatgtgttttgcttaactgagacatgatttatggaagaagctagattggattaaaaaaaaaaaaaaaaaaaaaaaaaaaaaaaaaaaaaa

SEQ ID NO: 10412 - protein, 110 aa, Glycine max; identical to SEQ ID NO: 3848
  misc_feature: Ceres CLONE ID no. 1626584
  misc_feature: Ceres CDNA ID no. 36706986
  misc_feature (5)..(103): Pfam Name: Ribosomal_L36e PFAM Desc: Ribosomal protein L36e
  misc_feature: Homolog of GI Number: 57471698 NR Desc: ribosomal protein L36
  misc_feature: Homolog of GI Number: 34908154 NR Desc: putative 60S RIBOSOMAL PROTEIN L36
  misc_feature: Homolog of GI Number: 50931673 NR Desc: putative 60S ribosomal protein L36
  misc_feature: Homolog of GI Number: 56182368 NR Desc: putative 60S ribosomal protein L36
  misc_feature: Homolog of GI Number: 12642884 NR Desc: putative 60S ribosomal protein
  misc_feature: Homolog of GI Number: 20148501 NR Desc: 60S ribosomal protein L36
  misc_feature: Homolog of GI Number: 21592383 NR Desc: 60S ribosomal protein L36
  misc_feature: Homolog of GI Number: 1276967 NR Desc: putative ribosomal protein
  misc_feature: Homolog of GI Number: 17865758 NR Desc: 60S ribosomal protein L36
  misc_feature: Homolog of GI Number: 21554932 NR Desc: 60S RIBOSOMAL PROTEIN L36 homolog

SEQ ID NO: 10413 - DNA, 849 bp, Glycine max
  misc_feature: Ceres CLONE ID no. 1626615
  misc_feature: Ceres CDNA ID no. 25402557
  CDS (141)..(656): REFERENCED BY SEQ ID NO: 10414
acgtttactctgttactcaatcttcacttattgacagattcacggcgcacgagccctagctcttatccgtgccgttgaatctcgccgtccggctgctgctgttagtcgacggagctctcctactattcaaaacagaagctatgaaatcgttcaatataaatggaaccactctttctgttgcactctacactgacgtaacaaattcaaaagaactcttggaaagtatgcaagccgggacattggagccagaagttgcattcctcaatgctttacttattccagatattttccctgttctagcagctgcacacaaaacacttgtagccaagtctcgagactctttgaccacacgcactcttcattcagagcttgtttacaactactcagggtctaagcatattactgaatctttgaaaagatgcggcatctctgacagcacaacttgtatccttgctgctcgatttgatgctagtcctgatgagataaaagctatagagaagctcattaacggcaaagagattgacctggaggagctagaagggagagcaaaccaatcccagatacaaaagatttacaagatatcttcctcggaacttggagtatcatcacttgctgatgcaataacttgtcgtatagctgctcgtgatgccctgtgagaagaatgaacgtgatctgcttgagttttcttatctccttgatctattgcagaaaatgtcatgaaatttataagaaagcttcaggctacctttatatatactttagctttcatgtgctgtaatgctgatgtatttttttattatcattcttactgcagtaacatttcttatggaaaaaaaaaaaaaaaaaaaa

SEQ ID NO: 10414 - protein, 171 aa, Glycine max
  misc_feature: Ceres CLONE ID no. 1626615
  misc_feature: Ceres CDNA ID no. 25402557
  misc_feature: Homolog of GI Number: 38454120 NR Desc: At4g34412
  misc_feature: Homolog of GI Number: 27712192 NR Desc: similar to CGI
  misc_feature: Homolog of GI Number: 20809577 NR Desc: CGI
  misc_feature: Homolog of GI Number: 20071790 NR Desc: 1810034M08Rik protein
  misc_feature: Homolog of GI Number: 12001980 NR Desc: My019 protein
  misc_feature: Homolog of GI Number: 26224770 NR Desc: CGI
  misc_feature: Homolog of GI Number: 61812574 NR Desc:  similar to CGI
  misc_feature: Homolog of GI Number: 50792175 NR Desc:  similar to CGI
MKSFNINGTTLSVALYTDVTNSKELLESMQAGTLEPEVAFLNALLIPDIFPVLAAAHKTLVAKSRDSLTTRTLHSELVYNYSGSKHITESLKRCGISDSTTCILAARFDASPDEIKAIEKLINGKEIDLEELEGRANQSQIQKIYKISSSELGVSSLADAITCRIAARDAL

SEQ ID NO: 10415 - DNA, 926 bp, Glycine max
  misc_feature: Ceres CLONE ID no. 1626626
  misc_feature: Ceres CDNA ID no. 25891733
  CDS (3)..(680): REFERENCED BY SEQ ID NO: 10416
ctccgtcacttttctcagctgctgttcctgcgcgtgaacaagcctcagccaaagccatggttaagcataacaatgttatccccaacggacacttccgtaagcactggcagaactatgtgaagacctggttcaatcagccagcacggaagacaagaagacggttggctcgtcagaagaaagctgtgaagattttccccagacctacagctggacctcttagacccattgtacatggtcaaactttgaaatacaacatgaaagtgagagctggaaggggattttcccttgaagaactcaaggcagcagggattcccaaaaagcttgcaccaacaattggtattgctgttgatcatcgccgcaagaaccgttctttggaaagtctgcaagctaatgtgcagaggctgaaaacatacaaggccaaattggttgtgttcccaagacgggcacagaaggttaaggctggtgattctactcccgaggagcttgcaaatgcaacgcaagtccagggttctttcttgcctattgtgagggagaagccaactgttgaacttgtaaaggttacagatgacatgaaggcttttaaagcttattacaagcttcgacttgaacgcacaaacaaacgccattatggtgccagactgaagaaggctgccgaagctgagaaggaagacaaaaagtgatgaccttagaagtctctcgtttgtagtccatccatataatagttgttgcaagacaatttttgcacgagattgattagctctattcagaacatgttcggtctaaaacatggatattttcacccatttttattgtgaacttttattcaagtttgttggtttaactagcattttgttttgtctggattaatttggcagtattgtattgattttgttcagaggctgttttctaaaaaaaaaaaaaaaaaa

SEQ ID NO: 10416 - protein, 207 aa, Glycine max
  misc_feature: Ceres CLONE ID no. 1626626
  misc_feature: Ceres CDNA ID no. 25891733
  misc_feature: null
  misc_feature: Useful for making plants with modulated nitrogen use efficiency
  misc_feature: Useful for making plants with modulated phosphate use efficiency
  misc_feature (6)..(184): Pfam Name: Ribosomal_L13e PFAM Desc: Ribosomal protein L13e
  misc_feature: Homolog of GI Number: 19310763 NR Desc: putative 60S ribosomal protein L13
  misc_feature: Homolog of GI Number: 21537149 NR Desc: 60S ribosomal protein L13
  misc_feature: Homolog of GI Number: 12580867 NR Desc: 60S ribosomal protein L13E
  misc_feature: Homolog of GI Number: 398918 NR Desc: cold induced protein
  misc_feature: Homolog of GI Number: 398922 NR Desc: cold induced protein
  misc_feature: Homolog of GI Number: 34897952 NR Desc: putative 60S ribosomal protein L13E
  misc_feature: Homolog of GI Number: 7441103 NR Desc: ribosomal protein L13.B
  misc_feature: Homolog of GI Number: 7441102 NR Desc: ribosomal protein L13.A
  misc_feature: Homolog of GI Number: 10176857 NR Desc: 60S ribosomal protein L13
  misc_feature: Useful for increasing chlorophyll and photosynthetic capacity
  misc_feature: Useful for making bigger plants
  misc_feature: Useful for making plants with increased biomass and foliage
  misc_feature: Utility: No N Useful for making plants tolerant to low nitrogen/low phosphate
MVKHNNVIPNGHFRKHWQNYVKTWFNQPARKTRRRLARQKKAVKIFPRPTAGPLRPIVHGQTLKYNMKVRAGRGFSLEELKAAGIPKKLAPTIGIAVDHRRKNRSLESLQANVQRLKTYKAKLVVFPRRAQKVKAGDSTPEELANATQVQGSFLPIVREKPTVELVKVTDDMKAFKAYYKLRLERTNKRHYGARLKKAAEAEKEDKK

SEQ ID NO: 10417 - DNA, 1102 bp, Glycine max
  misc_feature: Ceres CLONE ID no. 1626632
  misc_feature: Ceres CDNA ID no. 35383491
  CDS (3)..(917): REFERENCED BY SEQ ID NO: 10418
gggtgctggtggtgcagaaagggccattttctgaatgcgctctatctatctcttccgatctggctactaaccctaacccgcttcgaaccgtggcttcctcggcctcgcagaacctctctcgaagaaaatcttcttcttcgtcttcgttttctcaacaaacttccgggtcgacccggatcgtttaccgcgaacctcggatcccatcggaatccaattttccgatctggcagcagaactggttcatcgcattgctcttcctcatggctctcggattcttcgccctcgctctcttcctcttcatcactttcgactctgacatcgctccttcttccaccgcatccgccgcttcctccgaaggcgtcgaggtgcaggttacttacggcacggttctgaagcttatgcacgagaagaccaaatttcggttgcattctcatgacgtgccctacggttctggcagtggacaacaatcggttactggtttccccagtgttgacgattccaatagttattggattgtaagacctgagccaggaacttctgctaaacaaggtgaccccattaaaagtggcacaatcattagattgcagcacatgaggacaaggaagtggctgcacagccacttgcatgcatccccgatatcaggcaatcttgaggtaagttgttttggaggagaatccgaatctgacaccggggactattggaagcttataatagaaggaagtggaaagacttggaagcaggatcagaaaattcgccttcagcatattgacactggaggctatctacatagtcatgataagaaatacagtcgtattgctgggggacagcaggaggtttgtggtgttcgtgaaaagcgtgctgacaatgtctggttggcagccgaaggtgtctaccttcccgttacggaaagcaaatgagttaattagttattgtaaaccatgggtggtgggagtggcacagatgcagatttttctattaaaggataaatatacgggactattttagggttagataacggtagtaatattttgtcatagttacactttgttatgtagtaagtgcatggcccctttttccccgcagaaaaaaaaaaaaaaaaaaa

SEQ ID NO: 10418 - protein, 218 aa, Glycine max
  misc_feature: Ceres CLONE ID no. 1626632
  misc_feature: Ceres CDNA ID no. 35383491
  misc_feature (153)..(181): Pfam Name: MIR PFAM Desc: MIR domain
  misc_feature: Homolog of GI Number: 23505803 NR Desc: At2g25110/F13D4.70
  misc_feature: Homolog of GI Number: 50943411 NR Desc: Stromal cell
  misc_feature: Homolog of GI Number: 50946177 NR Desc: putative stromal cell
  misc_feature: Homolog of GI Number: 24644197 NR Desc: CG11999
  misc_feature: Homolog of GI Number: 55233604 NR Desc: ENSANGP00000013320
  misc_feature: Homolog of GI Number: 54639142 NR Desc: GA11321
  misc_feature: Homolog of GI Number: 72007807 NR Desc:  similar to stromal cell
  misc_feature: Homolog of GI Number: 61371911 NR Desc: stromal cell
  misc_feature: Homolog of GI Number: 73996025 NR Desc:  similar to Stromal cell
MALGFFALALFLFITFDSDIAPSSTASAASSEGVEVQVTYGTVLKLMHEKTKFRLHSHDVPYGSGSGQQSVTGFPSVDDSNSYWIVRPEPGTSAKQGDPIKSGTIIRLQHMRTRKWLHSHLHASPISGNLEVSCFGGESESDTGDYWKLIIEGSGKTWKQDQKIRLQHIDTGGYLHSHDKKYSRIAGGQQEVCGVREKRADNVWLAAEGVYLPVTESK

SEQ ID NO: 10419 - DNA, 821 bp, Zea mays
  misc_feature: Ceres CLONE ID no. 1629443
  misc_feature: Ceres CDNA ID no. 29191473
  CDS (133)..(480): REFERENCED BY SEQ ID NO: 10420
aagagcaccaaggaccttcggcgcccgttcaggatccacatcttcccgagcgagttcttggttgacctcttcctcttcggaccacctccaaggctcttggtgtagcttgccactctcaccaatcaagttttcatgtctgatctcgacattcagatcccaactgccttcgatcccttcgctgaggccaatgctggggactctggtgcggcagcagggtcaaaggactacgtacacgtgcgcatccagcagcgtaatggtcgcaagagcctgactaccgtccagggattgaagaaggagttcagctacagcaagatcctcaaagatctcaagaaagagttctgctgcaatggtacagtggtccaggacccagaacttggacaggtcattcagctccagggtgatcagaggaagaacgtctcgaatttcctcgtccaggccggcattgtgaagaaggagcacatcaagattcatggtttctgagcaccgccgggtccatagcaaaccaaccctgcatgcagggccagcttattatatataatatctgaggtggagcatatctatctggctgtgtactacaagcaggcctagtacgccgcctgcgcgttcctcctattacacataacacatatagccccctccctgcgtgtatgcttgttgccgtcgtgtcgaatcttgtactacgaggctccgtcgaacctcgatggcttgcttctttatcagaacatgtttgaataaacgctatttggtaaaaaaaaaaaaaaaaaaaaaaaaaaaaaaaaaaaaaaaaaaaaataaaaaaaaaaaaaaaaaaaaaaaaaaaa

SEQ ID NO: 10420 - protein, 115 aa, Zea mays; identical to SEQ ID NO: 9718
  misc_feature: Ceres CLONE ID no. 1629443
  misc_feature: Ceres CDNA ID no. 29191473
  misc_feature: The plant flowers significantly earllier than wild-type.
  misc_feature: The plant is abnormally small.
  misc_feature: null
  misc_feature: Useful for making plants with modulated biomass
  misc_feature: Useful for making plants with modulated flowering time
  misc_feature (27)..(108): Pfam Name: SUI1 PFAM Desc: Translation initiation factor SUI1
  misc_feature: Homolog of GI Number: 2668740 NR Desc: translation initiation factor
  misc_feature: Homolog of GI Number: 50937977 NR Desc: translational initiation factor eIF1
  misc_feature: Homolog of GI Number: 6478142 NR Desc: putative translation initiation factor eIF
  misc_feature: Homolog of GI Number: 21070377 NR Desc: translation initiation factor
  misc_feature: Homolog of GI Number: 53791638 NR Desc: putative translation initiation factor
  misc_feature: Homolog of GI Number: 20218809 NR Desc: putative translation factor
  misc_feature: Homolog of GI Number: 28193048 NR Desc: SUI1 protein
  misc_feature: Homolog of GI Number: 28193050 NR Desc: SUI1 protein
  misc_feature: Homolog of GI Number: 3334346 NR Desc: Protein translation factor SUI1 homolog
  misc_feature: Useful for accelerating flowering time
  misc_feature: Useful for increasing chlorophyll and photosynthetic capacity

SEQ ID NO: 10421 - DNA, 623 bp, Zea mays
  misc_feature: Ceres CLONE ID no. 1630285
  misc_feature: Ceres CDNA ID no. 25401549
  CDS (104)..(442): REFERENCED BY SEQ ID NO: 10422
atagaaaaagcccatttgcgccgccgcagcccgcagtcgcttgcgcgcagcagcacttcgcaccgccgccccatcccatcgccgccagtgtctgctcgatccgatggctcccacgaagaagtcgaagaagagcacagagagcatcaacaacaagctgcagctggtgatgaagagcggcaagtacaccctgggctacaagaccgtcctcaagacgctgcgcaactccaagggaaagctgatcatcatcgcaaacaactgccctccacttaggaagtctgagattgagtactacgccatgctggccaaagttagcgtgcaccatttccacggaaacaatgttgatcttggcactgcctgcggcaagtactacagggtgtgctgcctcagtatcatcgacccaggtgactcggacatcatcagtaccacccctggcacccagtgagccagccccggcacccattgcagctgcttcgcctttctcaagatgagatgagatgtagcgctccggccctatgtccgtttcctttttttatcttttagctatgtaattttgctaccatgtgtccatctaccatactgatagtacctcttattatggctgctaagaaaaaaaaaaaaaaaaa

SEQ ID NO: 10422 - protein, 112 aa, Zea mays
  misc_feature: Ceres CLONE ID no. 1630285
  misc_feature: Ceres CDNA ID no. 25401549
  misc_feature (12)..(106): Pfam Name: Ribosomal_L7Ae PFAM Desc: Ribosomal protein L7Ae/L30e/S12e/Gadd45 family
  misc_feature: Homolog of GI Number: 50511371 NR Desc: putative 60S ribosomal protein L30
  misc_feature: Homolog of GI Number: 2668750 NR Desc: ribosomal protein L30
  misc_feature: Homolog of GI Number: 57471710 NR Desc: ribosomal protein L30
  misc_feature: Homolog of GI Number: 71042078 NR Desc: Chain C
  misc_feature: Homolog of GI Number: 55297497 NR Desc: putative ribosomal protein L30
  misc_feature: Homolog of GI Number: 2879811 NR Desc: ribosomal protein L30
  misc_feature: Homolog of GI Number: 34909198 NR Desc: putative 60S ribosomal protein L30
  misc_feature: Homolog of GI Number: 6984132 NR Desc: 60S ribosomal protein L30
  misc_feature: Homolog of GI Number: 21280849 NR Desc: putative ribosomal protein L30
  misc_feature: Homolog of GI Number: 21593857 NR Desc: 60S ribosomal protein
MAPTKKSKKSTESINNKLQLVMKSGKYTLGYKTVLKTLRNSKGKLIIIANNCPPLRKSEIEYYAMLAKVSVHHFHGNNVDLGTACGKYYRVCCLSIIDPGDSDIISTTPGTQ

SEQ ID NO: 10423 - DNA, 693 bp, Zea mays
  misc_feature: Ceres CLONE ID no. 1632774
  misc_feature: Ceres CDNA ID no. 25446266
  CDS (68)..(487): REFERENCED BY SEQ ID NO: 10424
aatctcgttgtccgttgtactctctctctctattcgttccccgcctcaccccgagccagccgccgccatgcctcgccgcagctcaggaaggtctgccccacgcccagctccccgtgctgctccagtgaggaacccgccacagccagcgcgccaggctcctcctccagctcctgttcgagatggtggtggctccatgtttggaggaattgggtccaccattgcccaaggtatggcgtttggcacgggtagtgccatggcacacagggctgttgatgctgtattaggtccccggaccattcagcatgagactgttgcctcagaagctgctgctgctgcccctgcccctccagtgatgaatgctgatgcttgcagcatccattctaaggctttccaagattgtctcaacaactatggcagcgagatcagcaagtgccagttctacctagacatgctgaacgagtgccgccgtggtggcgtgtctgcctaagctgcctctggggttattcatggattttctttcggtgatgctatctcattaataagataccgtgaaacttttgtctccacagcttgaagctaaacttcctgggattaatacattttgttatcctatgctgttggagcagacttttgtctcttgatcataaatatttaaacgaacctgttatgttgtaaaaaaaaaaaaaaaaaaaa

SEQ ID NO: 10424 - protein, 139 aa, Zea mays
  misc_feature: Ceres CLONE ID no. 1632774
  misc_feature: Ceres CDNA ID no. 25446266
  misc_feature (94)..(135): Pfam Name: CHCH PFAM Desc: CHCH domain
  misc_feature: Homolog of GI Number: 52139112 NR Desc: Similar to Nur77 downstream protein 2
  misc_feature: Homolog of GI Number: 66852606 NR Desc: CHCH domain protein
MPRRSSGRSAPRPAPRAAPVRNPPQPARQAPPPAPVRDGGGSMFGGIGSTIAQGMAFGTGSAMAHRAVDAVLGPRTIQHETVASEAAAAAPAPPVMNADACSIHSKAFQDCLNNYGSEISKCQFYLDMLNECRRGGVSA

SEQ ID NO: 10425 - DNA, 437 bp, Zea mays
  misc_feature: Ceres CLONE ID no. 1633015
  misc_feature: Ceres CDNA ID no. 29191474
  CDS (2)..(253): REFERENCED BY SEQ ID NO: 10426
gccactctccatctattcctcacgagtgattgcggcggcggcggcggaagtaagaggcgatggggcactccaacgtgtggaactcgcaccccaagaactacgggcccggatcccgcgtctgccgggtctgtgcgaaccctcatggactgatcaggaagtacgggctgatgtgctgcaggcagtgcttccgcagcaacgccaaggacattggcttcatcaagtaccgctgaagtcagctgggcgggctatctgaatgccatctcttggacagtgtagtagaggcgatgccacaattttaattactgtcatttagatgttcccttcagaactctgctatttaagtccgccatgtttgtgatggagaacttaagctttgtttgttatactgattatgagttacctgtgctttgcttaaacaaaaaaaaaaaaaaaaaaaa

SEQ ID NO: 10426 - protein, 56 aa, Zea mays; identical to SEQ ID NO: 454
  misc_feature: Ceres CLONE ID no. 1633015
  misc_feature: Ceres CDNA ID no. 29191474
  misc_feature (3)..(56): Pfam Name: Ribosomal_S14 PFAM Desc: Ribosomal protein S14p/S29e
  misc_feature: Homolog of GI Number: 31745220 NR Desc: putative ribosomal protein S29
  misc_feature: Homolog of GI Number: 77555907 NR Desc: ribosomal protein S14p/S29e
  misc_feature: Homolog of GI Number: 57471722 NR Desc: ribosomal protein S29
  misc_feature: Homolog of GI Number: 13194826 NR Desc: putative ribosomal S29 protein
  misc_feature: Homolog of GI Number: 51970282 NR Desc: ribosomal S29 subunit
  misc_feature: Homolog of GI Number: 51971827 NR Desc: ribosomal S29 subunit
  misc_feature: Homolog of GI Number: 61654760 NR Desc: S29
  misc_feature: Homolog of GI Number: 47026945 NR Desc: ribosomal protein S29
  misc_feature: Homolog of GI Number: 32400973 NR Desc: ribosome protein S29

SEQ ID NO: 10427 - DNA, 615 bp, Zea mays
  misc_feature: Ceres CLONE ID no. 1633122
  misc_feature: Ceres CDNA ID no. 25446267
  CDS (97)..(408): REFERENCED BY SEQ ID NO: 10428
acacagcaaccagtaagccatcgctcacacggtcagaccgacgcactcactaacacacacacacggacacacaacttctccatacacgccttagccatggcttccgctgcgcagaagaagatgacaattgtttgcttgatgctgctggccgtcgtcggccaaatcgtcgctgatgatgatgttaccgtagaacatcccagccgcatctgcaccgaaacggtgattgatcctcgtgttcccaacaacgtgtgcatctgctccaagaactgcgcctgtgccggcaagtgtatccttgagtcggctgatgctgtccagacctgctttgtcgactgcgtcctcaagaacgactgcatctgcagcaacaagatcatccccggcgctgacgacccaaaggctaatgccaagtgaagtagtaccgctatcatcatctccaataatggcgtacgtacctaaatgaacgacctcccatgcatgcaccaacggggagagttaagtgtgtaataattaacggccggtatgtctgtacgacgtgtcttgtttgtaataataaaccccttgttttgtacgtgtaaaaataaaccactgtccacgcgcctaaaaaaaaaaaaaaaaaaa

SEQ ID NO: 10428 - protein, 103 aa, Zea mays
  misc_feature: Ceres CLONE ID no. 1633122
  misc_feature: Ceres CDNA ID no. 25446267
  misc_feature: Homolog of GI Number: 30039170 NR Desc: sulfur
  misc_feature: Homolog of GI Number: 1323746 NR Desc: sulfur
MASAAQKKMTIVCLMLLAVVGQIVADDDVTVEHPSRICTETVIDPRVPNNVCICSKNCACAGKCILESADAVQTCFVDCVLKNDCICSNKIIPGADDPKANAK

SEQ ID NO: 10429 - DNA, 884 bp, Zea mays
  misc_feature: Ceres CLONE ID no. 1633252
  misc_feature: Ceres CDNA ID no. 25446759
  CDS (387)..(581): REFERENCED BY SEQ ID NO: 10430
gcttgagcaagcctttcaaattgactataatggcctaatgggcactgggtgatgttttagagttagcatagagtaaaaaagaaaaaaaaagaaaaaaagatagaaggacctctgaaaaaatataaaaaagtacaaaaaaaaaaaaaaaaaaaactcgagttttttttttttttttttttgcgtcgccgactgaagatccttttgacatcgaactaggtactcggtcgtttctatctgcttcgtctgtttctgtacgccgccagtgagctttctttggccgccgttctactttccctcttctccctctctgttttttttttaatttcacctgccgcactactactcggccgccagggagaacctgacaaccggtcattggtttctcaatgtcctctctttgctataattattttttctttcagccgtacaagaacagcttcctgtttatcgatctgtctctctgcactgaaaacacgggccccgcagacctcgccgccaacgagcacatccctttgggcgggcgagctgctgtctgctgggagctgacggtggtccgagcacgacaggtcgggtgtgtgtaagatcagtcggtctcttgaccgtcttcgacttttaaaactcgtatctagtcctcatttacccgaatccctcgttgtgtaatgaatgtatggatctaatgtaatattcgggaccgagttatgagttgatagaacgtagatttttctgtgataattttctgtacctttactaatctgttctgtcatcaaggccgtagatgcaaaagatcccgagccactgtgatctctgttgacatatatttaaaactcattttgggttaggttattaaaccctaaccctaaaaacaaaaaaaaaaaaaaaaaaaa

SEQ ID NO: 10430 - protein, 64 aa, Zea mays
  misc_feature: Ceres CLONE ID no. 1633252
  misc_feature: Ceres CDNA ID no. 25446759
MSSLCYNYFFFQPYKNSFLFIDLSLCTENTGPADLAANEHIPLGGRAAVCWELTVVRARQVGCV

SEQ ID NO: 10431 - DNA, 743 bp, Zea mays
  misc_feature: Ceres CLONE ID no. 1633345
  misc_feature: Ceres CDNA ID no. 25446268
  CDS (264)..(473): REFERENCED BY SEQ ID NO: 10432
ggagcctcattttgatacgttttgctgaaccgtctttgtttttttttccccctgaatctgtgtggtatcccaagcgtcgagcccaatttcttttgtataagaataatgaggtgcccataaaaaataggccccaagaagattgttcgaatgtacaaaaaaaaaaaaaagacaacccataaggccataccctccaaccgctggatcgggtatcggcattactgggcgcacgagactagggatttcccccttgcaatcacgaatccatggcggatgctgaacctgttgatcagaagaattaccttgaggaacgttgcaagccgcaatgtgtgaaaacattgtatgattatgagaaatgcgtcaagagagtcgagagcgacggaagtgggcagaagcactgcaccggccaatacttcgactactggtcatgcgttgacaagtgtgttgcaccaaagctcttcgacaaactgaaatgataacggaacgcaactttgaaggcgcggctcctttcaggaagtcaaatagctccaataaacccatgccttggcctctggaatttgtttgctgaacctgtggcagggagcctcattttgatacgttttgctgaaccgtctttgtttttttttccccctgaatctgtgtggtatcccaagcgtcgagcccaatttcttttgtataagaataatgaggtgcccataaaaaataggccccaagaagattgttcgaatgtacgaaaaaaaaaaaaa

SEQ ID NO: 10432 - protein, 69 aa, Zea mays; identical to SEQ ID NO: 746
  misc_feature: Ceres CLONE ID no. 1633345
  misc_feature: Ceres CDNA ID no. 25446268
  misc_feature (7)..(69): Pfam Name: UCR_hinge PFAM Desc: Ubiquinol
  misc_feature: Homolog of GI Number: 62732974 NR Desc: ubiquinol
  misc_feature: Homolog of GI Number: 21554004 NR Desc: putative ubiquinol
  misc_feature: Homolog of GI Number: 15218058 NR Desc: ubiquinol
  misc_feature: Homolog of GI Number: 488712 NR Desc: ubiquinol
  misc_feature: Homolog of GI Number: 5103810 NR Desc: Similar to gbX79273 cytochrome c reductase hinge protein subunit from Solanum tuberosum.
  misc_feature: Homolog of GI Number: 50252217 NR Desc: putative ubiquinol
  misc_feature: Homolog of GI Number: 14532878 NR Desc: putative ubiquinol
  misc_feature: Homolog of GI Number: 68128316 NR Desc: ubiquinol
  misc_feature: Homolog of GI Number: 23509470 NR Desc: ubiquinol
  misc_feature: Homolog of GI Number: 56496460 NR Desc: ubiquinol

SEQ ID NO: 10433 - DNA, 586 bp, Zea mays
  misc_feature: Ceres CLONE ID no. 1633551
  misc_feature: Ceres CDNA ID no. 36706696
  CDS (67)..(378): REFERENCED BY SEQ ID NO: 10434
gcacaaatcctcttcctcgagttctcctcaaccaaattcaaagtcacagcggcgaaactctcggcgatgtctggccgcggcaagggcgggaagggtctgggcaagggcggcgccaagcgccaccgcaaggtgctgcgtgacaacatccagggcatcaccaagccggcgatccgcaggttggcgagggggggcggcgtcaagcgcatctccgggctcatctacgaggagacccgcggcgtgctcaagatcttcctcgagaacgtcatccgcgacgccgtcacctacaccgagcacgcccgccgcaagactgtgaccgccatggacgttgtctacgctctcaagcgccagggctgcaccctctacggtttcggcggttaggtcgcccctctcccggtggcgaattacgtggtggcggtggcggtcgtgttgtgttcttggtctagttagtctgtgttgtctttatcggtgctgttttctgtggtggttgtactgcatcgttctagtttctagtccatgtgctgtaatatctcgctgctgtaatcaatggaatgtcctcgtttcaagctaaaaaaaaaaaaaaaaaaaa

SEQ ID NO: 10434 - protein, 103 aa, Zea mays
  misc_feature: Ceres CLONE ID no. 1633551
  misc_feature: Ceres CDNA ID no. 36706696
  misc_feature (66)..(92): Pfam Name: TAF PFAM Desc: TATA box binding protein associated factor
  misc_feature: Homolog of GI Number: 74004256 NR Desc:  similar to germinal histone H4 gene
  misc_feature: Homolog of GI Number: 61834317 NR Desc:  similar to germinal histone H4 gene
  misc_feature: Homolog of GI Number: 74004178 NR Desc:  similar to germinal histone H4 gene
  misc_feature: Homolog of GI Number: 76608060 NR Desc:  similar to germinal histone H4 gene
  misc_feature: Homolog of GI Number: 68441417 NR Desc:  similar to germinal histone H4 gene
  misc_feature: Homolog of GI Number: 61820747 NR Desc:  similar to germinal histone H4 gene
  misc_feature: Homolog of GI Number: 57098917 NR Desc:  similar to germinal histone H4 gene
  misc_feature: Homolog of GI Number: 50911547 NR Desc: histone H4
  misc_feature: Homolog of GI Number: 74004228 NR Desc:  similar to germinal histone H4 gene
  misc_feature: Homolog of GI Number: 68441405 NR Desc:  similar to histone H2A
MSGRGKGGKGLGKGGAKRHRKVLRDNIQGITKPAIRRLARGGGVKRISGLIYEETRGVLKIFLENVIRDAVTYTEHARRKTVTAMDVVYALKRQGCTLYGFGG

SEQ ID NO: 10435 - DNA, 692 bp, Zea mays
  misc_feature: Ceres CLONE ID no. 1633885
  misc_feature: Ceres CDNA ID no. 25446269
  CDS (69)..(548): REFERENCED BY SEQ ID NO: 10436
atcttgctctgaacgcattcctcccatctcccaagacctcctcagacccgagaagcgcagctgcggccatggacgccaccggcactggagctggagggaaggcgaagaagggagcggccggtcgcaaggccggcgggccgaggaagaagtcggtgacgaggtccgtgaaggccgggctccagttccccgtcggccgcatcgggcgctacctcaagaagggccgctacgcgcagcgcgtcggcagcggtgcccccgtctacctcgcggccgtcctggagtacctcgccgctgaggtcctggagctcgccggcaacgctgccaaggacaacaagaagacgcgcatcgtcccgcgccacgtgctgctggcgatccgcaacgacgaggagctcgggaagctgctgaccggcgtgaccatcgcccacggcggcgtgttgcccaacatcaacccggtcctgctgcccaagaagacggcggagaaggcgtccagcggcgggagcaaggaggccaagtcgcccaagaaggccgccaagtcccccaagaaggcatagggtttggaggcggatccgatgttgtcatgtgtaggttgtaagcgggcaatgtgattggctgtgtatctgcttcgctcaagttgctttatgtcattcctaatggaataggaaatgccgtgtttccaaaaaaaaaaaaaaaaaaaa

SEQ ID NO: 10436 - protein, 159 aa, Zea mays
  misc_feature: Ceres CLONE ID no. 1633885
  misc_feature: Ceres CDNA ID no. 25446269
  misc_feature (37)..(101): Pfam Name: CBFD_NFYB_HMF PFAM Desc: Histone
  misc_feature: Homolog of GI Number: 729671 NR Desc: Histone H2A
  misc_feature: Homolog of GI Number: 34914498 NR Desc: putative histone H2A
  misc_feature: Homolog of GI Number: 47026912 NR Desc: histone H2A
  misc_feature: Homolog of GI Number: 121982 NR Desc: Histone H2A.2.2
  misc_feature: Homolog of GI Number: 7649159 NR Desc: histone H2A
  misc_feature: Homolog of GI Number: 47026919 NR Desc: histone H2A
  misc_feature: Homolog of GI Number: 121974 NR Desc: Histone H2A.2.1
  misc_feature: Homolog of GI Number: 122006 NR Desc: Histone H2A
  misc_feature: Homolog of GI Number: 68441405 NR Desc:  similar to histone H2A
  misc_feature: Homolog of GI Number: 61826353 NR Desc:  similar to Histone H2A.x
MDATGTGAGGKAKKGAAGRKAGGPRKKSVTRSVKAGLQFPVGRIGRYLKKGRYAQRVGSGAPVYLAAVLEYLAAEVLELAGNAAKDNKKTRIVPRHVLLAIRNDEELGKLLTGVTIAHGGVLPNINPVLLPKKTAEKASSGGSKEAKSPKKAAKSPKKA

SEQ ID NO: 10437 - DNA, 458 bp, Zea mays
  misc_feature: Ceres CLONE ID no. 1634429
  misc_feature: Ceres CDNA ID no. 25446270
  CDS (70)..(252): REFERENCED BY SEQ ID NO: 10438
aaaccctaacactcatcacgccgccactgatctgctctgttgctggagcagtagcgagagggattctggatggccaagtcgaagaaccacacggcgcataaccaatcgttcgaggcgcacaagaacggcatcaagaagcccaagcgccaccgccagacctccaccaaggggatggacccgaagtttctgaggaacttgaggtactcaaggaagggcaacaagaagagtggcgaggctgagtccgaggagtaagatgatggtgattgagtttgtggcgacaaatgcatctcttgtatcgctaagagtcttagctgtgaacttagttctcacttctgtgtgactgtgatcaaaggagatccatcagttggtaccgaagtgtattttatgtcttgttggttacctggaatttaattaaaaccatcagttgtaccaaaaaaaaaaaaaaaaaaaaaaaaaaa

SEQ ID NO: 10438 - protein, 60 aa, Zea mays
  misc_feature: Ceres CLONE ID no. 1634429
  misc_feature: Ceres CDNA ID no. 25446270
  misc_feature (4)..(42): Pfam Name: Ribosomal_L29e PFAM Desc: Ribosomal L29e protein family
  misc_feature: Homolog of GI Number: 34905656 NR Desc: P0475H04.11
  misc_feature: Homolog of GI Number: 7959366 NR Desc: ribosomal protein L29
  misc_feature: Homolog of GI Number: 7549643 NR Desc: ribosomal protein L29
  misc_feature: Homolog of GI Number: 30679956 NR Desc: 60S ribosomal protein L29
  misc_feature: Homolog of GI Number: 7549645 NR Desc: ribosomal protein L29
  misc_feature: Homolog of GI Number: 27764982 NR Desc: At3g06680
  misc_feature: Homolog of GI Number: 12231298 NR Desc: ripening regulated protein DDTFR19
  misc_feature: Homolog of GI Number: 72051829 NR Desc:  similar to 60S ribosomal protein L29
  misc_feature: Homolog of GI Number: 61654674 NR Desc: L29
  misc_feature: Homolog of GI Number: 58388930 NR Desc: ENSANGP00000011508
MAKSKNHTAHNQSFEAHKNGIKKPKRHRQTSTKGMDPKFLRNLRYSRKGNKKSGEAESEE

SEQ ID NO: 10439 - DNA, 636 bp, Zea mays
  misc_feature: Ceres CLONE ID no. 1634431
  misc_feature: Ceres CDNA ID no. 25447088
  CDS (96)..(338): REFERENCED BY SEQ ID NO: 10440
gaagagggaaggggggatatcggggaaaaaaacgcaaggtaccaccgtaccagcagcgcaaagagccgggtgttggcacagatcaggcggccgccatggcggatcagttcgcggattcggcgaacaacgtgatcatcgaggaggtgaacaagggactgaacccaggaatggtggttctgctcgtggttgccagcttcctgctgctcttctttgccgggaactacgcgctgtatgtgtacgcgcagaagacgctcccgccgaagaagaagaagccggtctccaagaagaagctgaagagggaaaagctgaagcagggtgtctccgcgccaggggagtgaacagacagggatgccgccgatcggcccgtcctgagcccgccccctatttacatgattgtcgaagaaaaaagatacacctgctggagccgcggtgttcgtagtaattttgttctgtagatgctttttgttgtcttcgatggtagtgcatttgtattggacaccttgtttcagcaactgatgaatctttagcctaaaccgagttactcttttgttcctgtaaactacaagtacttcaaatgacgctggtgatggtgaacctgagtaaaattggcgagtcccaaaaaaaaaaaaaaaaaaa

SEQ ID NO: 10440 - protein, 80 aa, Zea mays; identical to SEQ ID NO: 994
  misc_feature: Ceres CLONE ID no. 1634431
  misc_feature: Ceres CDNA ID no. 25447088
  misc_feature: Useful for making plants with modulated growth and phenotype characteristics
  misc_feature: The sequence is a functional homolog of  SEQ ID NO 1769 in the  11/479,226 US patent application
  misc_feature: The sequence is a functional homolog of  SEQ ID NO 2604 in the  10/374,780 US patent application
  misc_feature: The sequence is a functional homolog of  SEQ ID NO 960 in the  10/225,066 US patent application
  misc_feature (10)..(80): Pfam Name: S1FA PFAM Desc: DNA binding protein S1FA
  misc_feature: Homolog of GI Number: 38347601 NR Desc: OSJNBa0042I15.14
  misc_feature: Homolog of GI Number: 38347600 NR Desc: OSJNBa0042I15.13
  misc_feature: Homolog of GI Number: 1173349 NR Desc: DNA
  misc_feature: Homolog of GI Number: 498705 NR Desc: s1Fa

SEQ ID NO: 10441 - DNA, 557 bp, Zea mays
  misc_feature: Ceres CLONE ID no. 1634527
  misc_feature: Ceres CDNA ID no. 40041513
  CDS (2)..(397): REFERENCED BY SEQ ID NO: 10442
gctgattcattgccagcgaagcaaactccaatctccagcaagcgcgtcgtcgtgtgagaaaaagagcagagcgccaccgtgtgggggattctgtccaaccgtcgatttgaccctgcgatccagactggggcagctccgcgacgtcgtgagggaagatgggtgcctcgcgccttttaatattagcaagccgggagcctgggattgctcattggagcaggcacaagccttccgcccatgccttgccgcagtgctgccgcctcgcatcctcactgttgacgagcaagccactgtggaatctgaggttcagcaagtagagactgctgagcaggagctcgttgaaggagaagaacatgtggttcaggaggagccacaaggcgaggagtatgatctgatctaggtggcgtttctcagttgacattggcgccgacgatccttagttcgttttatatttattattttattttgtaataagtcttccgctatgtaataaatactctgatgttttatgacatttatctctatacactctgttcatgtaaaaaaaaaaaaaaaaaaaa

SEQ ID NO: 10442 - protein, 52 aa, Zea mays
  misc_feature: Ceres CLONE ID no. 1634527
  misc_feature: Ceres CDNA ID no. 40041513
MGASRLLILASREPGIAHWSRHKPSAHALPQCCRLASSLLTSKPLWNLRFSK

SEQ ID NO: 10443 - DNA, 581 bp, Zea mays
  misc_feature: Ceres CLONE ID no. 1634557
  misc_feature: Ceres CDNA ID no. 25446271
  CDS (52)..(351): REFERENCED BY SEQ ID NO: 10444
tgcttgatacctgattagatctttgtacagtttctcttttcaataatcaagatgagccgtggtggtagtgccggtggtggtcaaagttctctgggttatctctttggaagcggtgagccccccaaaccagcagtggcaccagctgcaagtgctccacctgttgagaaaccatctgctgcaaagactgatgcggccaagcaggttgctgctggggttaccagccaaaccaataactaccacagggctgatggtcagaacactggcaacttccttacggaccgtccttcaaccaaggtccacgctgctcctggcggtggctcttccctgggctacctgttcggtggcaactgatgcccgtgctggtgcgctcaccaaagttatcctcccctgcctgctgcgtgctatgtctgaatcgtgaacaaccgttgtcatttcatgtgtgtaccccgtgcaatgctttgtgcgcatggttgatttctctgtggcaaacttcccgtcctgcatggggttgtaagctgtctctaaatttcacggcaagtcgtgtgcctgaaccttcatcagaaaaaaaaaaaaaaaaaaaa

SEQ ID NO: 10444 - protein, 99 aa, Zea mays; identical to SEQ ID NO: 9548
  misc_feature: Ceres CLONE ID no. 1634557
  misc_feature: Ceres CDNA ID no. 25446271
  misc_feature: Homolog of GI Number: 21592628 NR Desc: putative nitrilase
  misc_feature: Homolog of GI Number: 2765837 NR Desc: NAP16kDa protein
  misc_feature: Homolog of GI Number: 21280823 NR Desc: putative nitrilase
  misc_feature: Homolog of GI Number: 21592782 NR Desc: nitrilase associated protein
  misc_feature: Homolog of GI Number: 28827480 NR Desc: putative nitrilase associated protein

SEQ ID NO: 10445 - DNA, 605 bp, Zea mays
  misc_feature: Ceres CLONE ID no. 1634589
  misc_feature: Ceres CDNA ID no. 25446272
  CDS (170)..(385): REFERENCED BY SEQ ID NO: 10446
gaggccgtagttccgagagaagcgagcggaccctaaaagagaggaagaaacctgctggcttccttctcgtccccaacaggcgtccccaagactccaacttcctcgatctagccatgtcgtccgcgccgcctgcccaccagtccaagccttccccccaccgccggcgaagatgatcataccggtgcgctgcttcacctgcggcaaggtgattgggaacaagtgggacctctacctcgacctcctccaggccgactactcggaaggggatgctctggatgctttggaattgttccgctactgctgcaggcgaatgctcatgacccatgttgacctcattgagaagttgctcaactacaacacactggagaagaccgagacaagttaagtgagcaagcatatcatgctctgaaagcactactgtttcgtagtatcatatatattgtaggcggtatgttgtttcttctctatcaggagaggattgttgtgagtgtgaacttgcttttgctctcgagcattcaaggactgacaagggcatgttgcatctatgctacgatgttggagattttaatcgatataacggctaacaaaaaaaaaaaaaaaaaaaa

SEQ ID NO: 10446 - protein, 71 aa, Zea mays
  misc_feature: Ceres CLONE ID no. 1634589
  misc_feature: Ceres CDNA ID no. 25446272
  misc_feature (1)..(60): Pfam Name: RNA_pol_N PFAM Desc: RNA polymerases N / 8 kDa subunit
  misc_feature: Homolog of GI Number: 62733950 NR Desc: dna
  misc_feature: Homolog of GI Number: 21537033 NR Desc: RNA polymerase II subunit
  misc_feature: Homolog of GI Number: 2833375 NR Desc: DNA
  misc_feature: Homolog of GI Number: 4508082 NR Desc: Putative RNA  polymerase II subunit Rpb10
  misc_feature: Homolog of GI Number: 62641959 NR Desc:  similar to Ab1
  misc_feature: Homolog of GI Number: 33086454 NR Desc: Ab1
  misc_feature: Homolog of GI Number: 72099707 NR Desc:  similar to DNA
  misc_feature: Homolog of GI Number: 82915574 NR Desc:  polymerase
  misc_feature: Homolog of GI Number: 55635107 NR Desc:  similar to Ab1
  misc_feature: Homolog of GI Number: 60473508 NR Desc: RNA polymerases N/8 kDa subunit
MIIPVRCFTCGKVIGNKWDLYLDLLQADYSEGDALDALELFRYCCRRMLMTHVDLIEKLLNYNTLEKTETS

SEQ ID NO: 10447 - DNA, 648 bp, Zea mays
  misc_feature: Ceres CLONE ID no. 1634723
  misc_feature: Ceres CDNA ID no. 25446273
  CDS (2)..(349): REFERENCED BY SEQ ID NO: 10448
acgaccgcactcgccccctctcagccctcctctcctcccctaccaaccggtccctcccaaaccaccattgttgtgctcgcagctccgtggccgcgcctgctcgagccatttctggccgggctggggccgacaccgagcatggcggatgttggggatgccgtggtccgcgtccccccgctttcccttgccaccagcgagcctctggccggccattttgctctccccgtggagatacctgaaggtagaagacggatggaccgcgggcacaaatttgaccaagtgcagggggctaactgcgcatcccgtgacccacttcaatagtaccaaaaggacctgtttgctggaataaagtcgtggcctgttccagggactgaagcgcaaaggtatctacttgatttggttgatggtgtgacttggccttcgtccctgccaccgggacagacggtcgagtgggttactgcttccgcaggagaggaccaggaggagtagcctggccaggcttcgccatgttactcggttcttctccgttagttatttccgctgcattaaaatttatggttattatttctgaaactccgataatgtaatcactaatggtacttcctaaattgtggtattatgctttaccaaaaaaaaaaaaaaaaaaaa

SEQ ID NO: 10448 - protein, 67 aa, Zea mays
  misc_feature: Ceres CLONE ID no. 1634723
  misc_feature: Ceres CDNA ID no. 25446273
MLGMPWSASPRFPLPPASLWPAILLSPWRYLKVEDGWTAGTNLTKCRGLTAHPVTHFNSTKRTCLLE

SEQ ID NO: 10449 - DNA, 452 bp, Glycine max
  misc_feature: Ceres CLONE ID no. 1635492
  misc_feature: Ceres CDNA ID no. 36705050
  CDS (2)..(223): REFERENCED BY SEQ ID NO: 10450
gagagaaggaaagcgagagtcggaagagatttggcgcgagttgaaaaccctagtgagttccaatgatctccactcccttaacctcatgcaacacaccatattgggaaggttgcaggatagcaatgcggtgttgtcgcatttcaacgacttctctcagcactgctttgctgagatttccggcgacatcgctagaaacacgcgtgttttgagaagtatgaaataaaaaattatggctacttatcccgatgcatttcctgaagactcatcgagcgaagtgattgataggagaccggatcttgaaatgtccaagtaactaacgttatccgaacacagattagaatgagttatactaatgaaagtttgtttcttctattgtaataaacatgtcctatttgtctcaatcgtttcaacaaagcttcttgcccttaaaaaagaaaaaaaaaaaaaaaaaa

SEQ ID NO: 10450 - protein, 45 aa, Glycine max
  misc_feature: Ceres CLONE ID no. 1635492
  misc_feature: Ceres CDNA ID no. 36705050
MQHTILGRLQDSNAVLSHFNDFSQHCFAEISGDIARNTRVLRSMK

SEQ ID NO: 10451 - DNA, 2241 bp, Glycine max
  misc_feature: Ceres CLONE ID no. 1636357
  misc_feature: Ceres CDNA ID no. 40139597
  CDS (99)..(2081): REFERENCED BY SEQ ID NO: 10452
agagaagaggagctcttaactcttgagcccactttaacgccacagcacggacggtgatagggttttgtggaattttctgggaaaaaatttcctagaaaatggacgatggcatgcaattgcaaatctcccttgacaagctaccaatcaagcgcttggattctattgaagaaaatggaattgaacgattcccacttgacgtggattacgatgagaagcggctctccctaattaggcgaattgacttcgcttgggctgttgagaaggatgaggagaagaagaagaagaagcagaagagctcaaaggagacctcagctccatggcaatggcagggcatggtagaaaatttgcagttggctcatcaggagctctctgtcatcatagatctcattaacactgttgaagcaaatgatgcagtaacagtggctagcatgacaagaccaaaactattaccaaatgaagctttgtctgacctggctgtatctgcagccaccaagctgcaatgttaccgtcatgttgggaaatatttcaagcaatctgccaaggcttttgaacaacaagttgctcgggaagctaggttttatggtgcccttatcaggttgcagcaaaattggaaggttaaacggcaacgacaggcagctattgttccagggaatgaaggcttcacctttgatctcttagataactcatatgaccaagcagctattattcgctcattgtctatgtccactgttcgagtcaatcatgatgcagctggaatgctggcaataaatgtgtctcctgatttatgccattctctccaatttggttttgttggtgcacaatcagatgatacctggagaaaatccaatgaaaacaaatcccacttttcaggtgagcataatttgggagaaatgggtgaagagtccttaagtgatgaagagtgtgttaagaaaacgaattcactccttcgtgaagtacatgaagcaattttcaatgaacaggtgtttgatctggtgaatcgagaagcatttaacacagttgcaggtgtcagtgtgactggaatacgggaaaactatttacaattaagcttaggtcaaggaacctctgtgtacttaacacttgtgtccaatagtcaagatcattctacagttgaagatgaactcaatgataatgtagaaaatgcaattttacctctggaatcatctgatggaatgaagcgtgaagccaaacagaacacctctaagaaagggcagttttctaattccatctgctatgagatttatattcaacagatttttcatgaacatatatttggaaaaggtgacgaaaaggcaatttcctctggaaatcgtttgtctggcgtacaggcaagggatggatccagtcttcttggtcatttttttaaatctttggctcacaggatattttcaactaaagttcttgcagagctggaaaatgtggtatgcaaggtcccatatctacagctaatttctaatcccacatggaattctcgggcttcgtcatggacactctacatggaggttccccaatctattcttcgtggtagccaaaccaaaacatcagattattacgagaaaaatgctgccaagcgtcagttttggactaaggtggtggtaaatgatgattgcatcaacgttaaagctgaaggttctccaaatgttgcaggtttgttcaagggaaagattgaggaaacccattcaataaacaaatataactgcaacttagctgatcttcctgtgattattctgcagcaggttgctagccaaattattaattggctctatcaggaagctatgatggttgggataaaagtaaatcgagacttcttatgcctatctttggagctgaagcagggtgaaacacttggccttgttgcaagtgttgatccagaagatagtgaagagtgtatatcttggtggttggtcatggaggacagttttgctgaggagcaaaagcttcatatgagcatcacggatggtgcatctgaatataggaaattcctaggtcacttgtctcttgatttgttatacgcaacactgatcgacttggttggcttgtgcagtggtggaggcggccaatgaagttgtgtcaatgaatgtttttcttgcactttgtcaagtggaagatctaggaggtctcgtgcaacaactgttttctgtctatttatgagaaataaatgagaagagatgaagagaaaaatgttaaaaaaaaaaaaaaaaaaaaaaaaaaaaaaaaaaaaaa

SEQ ID NO: 10452 - protein, 660 aa, Glycine max
  misc_feature: Ceres CLONE ID no. 1636357
  misc_feature: Ceres CDNA ID no. 40139597
MDDGMQLQISLDKLPIKRLDSIEENGIERFPLDVDYDEKRLSLIRRIDFAWAVEKDEEKKKKKQKSSKETSAPWQWQGMVENLQLAHQELSVIIDLINTVEANDAVTVASMTRPKLLPNEALSDLAVSAATKLQCYRHVGKYFKQSAKAFEQQVAREARFYGALIRLQQNWKVKRQRQAAIVPGNEGFTFDLLDNSYDQAAIIRSLSMSTVRVNHDAAGMLAINVSPDLCHSLQFGFVGAQSDDTWRKSNENKSHFSGEHNLGEMGEESLSDEECVKKTNSLLREVHEAIFNEQVFDLVNREAFNTVAGVSVTGIRENYLQLSLGQGTSVYLTLVSNSQDHSTVEDELNDNVENAILPLESSDGMKREAKQNTSKKGQFSNSICYEIYIQQIFHEHIFGKGDEKAISSGNRLSGVQARDGSSLLGHFFKSLAHRIFSTKVLAELENVVCKVPYLQLISNPTWNSRASSWTLYMEVPQSILRGSQTKTSDYYEKNAAKRQFWTKVVVNDDCINVKAEGSPNVAGLFKGKIEETHSINKYNCNLADLPVIILQQVASQIINWLYQEAMMVGIKVNRDFLCLSLELKQGETLGLVASVDPEDSEECISWWLVMEDSFAEEQKLHMSITDGASEYRKFLGHLSLDLLYATLIDLVGLCSGGGGQ

SEQ ID NO: 10453 - DNA, 837 bp, Glycine max
  misc_feature: Ceres CLONE ID no. 1636548
  misc_feature: Ceres CDNA ID no. 25446217
  CDS (164)..(541): REFERENCED BY SEQ ID NO: 10454
ttcctctcttaacttctcttttcacaccactcactttctctctcctctccatgtcttcttccttacatcaaacgtagaatttttttttccttttcccctttttttaatcttaacccaatttttactctcgcaaagtggtgtatttggggaagtttgatttgaaatgaacaaaggacagtcaccagagcctcttgatttcttcatctggactgttgaggatgttggcttgtggctggagactataaatcttggtagttaccgccaaatttttaaagaaaatggtgttaatggagaatacctggaaggcatgtccatgtttacaactgaacaaatcctacgttttataagacgttgccacatgaagtggggagacttcatcacattgtgcaaggaattaagacggattaaagtggcttgtctgaaaggggagcagaaggtgcgacggccatggtgggcaccggcttgcctatctacagtgttcttaaaggttgcaaaatccaacagacaatcaagagttgtttccttgaagctggaaccatgataatacaataagttaaagctctgcatatgtgtaccagtgtacgtatagcaaatttctttttgcctagaaaacaaaagataggaaaactttttctagcccccctttttttattttatttttcttttgattccaaaacctagttgtttcttctcctctggagaactgaactgttatgcagtagaaggtccttgtgcactaatttccggtgctgtgtaattatgtattctcttgtattatttgtgaacgaaaatacgatatatgctgtttctcttcaaaataaaaaaaaaaaaaaaaaa

SEQ ID NO: 10454 - protein, 125 aa, Glycine max
  misc_feature: Ceres CLONE ID no. 1636548
  misc_feature: Ceres CDNA ID no. 25446217
  misc_feature (13)..(44): Pfam Name: SAM_1 PFAM Desc: SAM domain
MNKGQSPEPLDFFIWTVEDVGLWLETINLGSYRQIFKENGVNGEYLEGMSMFTTEQILRFIRRCHMKWGDFITLCKELRRIKVACLKGEQKVRRPWWAPACLSTVFLKVAKSNRQSRVVSLKLEP

SEQ ID NO: 10455 - DNA, 833 bp, Glycine max
  misc_feature: Ceres CLONE ID no. 1636569
  misc_feature: Ceres CDNA ID no. 25447022
  CDS (199)..(609): REFERENCED BY SEQ ID NO: 10456
acagcgccgcgccgcctcaacaactgaaacaaacactatccctaatccctttcttcctctctgcacgctcttgcctcctccgatctcagaacagaacctacgcactgcattggaagatacaagaatatcatcagtttctcctattcattaactccagttactcactgaagataacattggaagcattgggcaataaaaatgagcaattcctctgctggaacctcatcaaaaccaagagcagcttcctcacaaccatcagaaacttcgtctaagcgcaaaagaggagttttccaaaaagaattgcagcacatgatgtatggctttggagatgatcctaatccacttcctgaaagtgtggctcttatggaggacattgttgtggagtatgtcacagaactggtacataaagcccaagatattggatctcagagggggaagctatcagttgaggatttcctctatttgattcgcaaggattcgccaaaacttaaccgctgtacagaactactttctatgaatgaagagctgaaacaagcaagaaaggtttttgaatcagacgaagagaaactgaggaaggtttttgaggtggatgactcagttgaaggatgaataatgaagttactgaaatgcactaatgactcagctaacctgttctttgttggttatgatgtgtttcgcttttttgaggatgctctagaaaatttgttttatcttcgtactcaaatataatgtgtacataatcttaaaatcaacttgtgccttatacgcatgtttttgtttatatttaagaaatatatatatattatttgtaaaaaaaaaaaaaaaaaaaaaaa

SEQ ID NO: 10456 - protein, 136 aa, Glycine max
  misc_feature: Ceres CLONE ID no. 1636569
  misc_feature: Ceres CDNA ID no. 25447022
  misc_feature (29)..(119): Pfam Name: TFIID PFAM Desc: Transcription initiation factor IID
  misc_feature: Homolog of GI Number: 39545908 NR Desc: TAF13
  misc_feature: Homolog of GI Number: 34894962 NR Desc: P0487E11.18
  misc_feature: Homolog of GI Number: 53792373 NR Desc: putative TAF13
  misc_feature: Homolog of GI Number: 31224258 NR Desc: ENSANGP00000011751
  misc_feature: Homolog of GI Number: 58569313 NR Desc: GekBS181P
  misc_feature: Homolog of GI Number: 49522268 NR Desc: LOC443712 protein
  misc_feature: Homolog of GI Number: 57103206 NR Desc:  similar to TATA box
  misc_feature: Homolog of GI Number: 27694959 NR Desc: similar to TATA box binding protein
  misc_feature: Homolog of GI Number: 57525448 NR Desc: similar to TATA box
MSNSSAGTSSKPRAASSQPSETSSKRKRGVFQKELQHMMYGFGDDPNPLPESVALMEDIVVEYVTELVHKAQDIGSQRGKLSVEDFLYLIRKDSPKLNRCTELLSMNEELKQARKVFESDEEKLRKVFEVDDSVEG

SEQ ID NO: 10457 - DNA, 665 bp, Glycine max
  misc_feature: Ceres CLONE ID no. 1636574
  misc_feature: Ceres CDNA ID no. 35383493
  CDS (34)..(408): REFERENCED BY SEQ ID NO: 10458
acaaaacaatctcatttaaaatctcatcatataatggcttgtagaccttcttctttccttgcacttcttctcatcaccactatccttcttgccactacatggcaagcagttgctagacgccacattggtccaaaacactcaaacaatggggacaagaaagagcctcagtttttgttccctcctgaaggtaatttccattttcctggctttgggggagtagggttgccacctttctttgggtttacacctcaaaacccaaacactggtggtagtggactagggtcaggaccagctggtcgtggttacgttccaggtggtgatgacacgtttgtcccaaaccctggttttgaggttccaaaccctgggagtggtggtggagttccagttccagttccagttaatccgtgagtgctctcaatcatgatgaggcatcatgcattttttgcatgattgcactagttaaggttgtgcagtttccaagcccgttatgcttttgacaaatagaagtactagtctactgtttttttgtatccgtgaataagtaagtagttctctgtgtgtactttatctgctattcgtatgcagagcctctctgctcttttcttgtttggaatgaaatttaagcatgctgtaatgctggttgtattaaaaaaaaaaaaaaaaaa

SEQ ID NO: 10458 - protein, 124 aa, Glycine max
  misc_feature: Ceres CLONE ID no. 1636574
  misc_feature: Ceres CDNA ID no. 35383493
  misc_feature: Homolog of GI Number: 21554333 NR Desc: putative cell wall protein
  misc_feature: Homolog of GI Number: 475046 NR Desc: putative cell wall protein
  misc_feature: Homolog of GI Number: 6851364 NR Desc: putative cell
  misc_feature: Homolog of GI Number: 6851366 NR Desc: putative cell
MACRPSSFLALLLITTILLATTWQAVARRHIGPKHSNNGDKKEPQFLFPPEGNFHFPGFGGVGLPPFFGFTPQNPNTGGSGLGSGPAGRGYVPGGDDTFVPNPGFEVPNPGSGGGVPVPVPVNP

SEQ ID NO: 10459 - DNA, 1253 bp, Glycine max
  misc_feature: Ceres CLONE ID no. 1636640
  misc_feature: Ceres CDNA ID no. 36706860
  CDS (106)..(903): REFERENCED BY SEQ ID NO: 10460
aaaaaaaaaaaaagagagagagaaaagagaaagaaggaaggcgaagcccacaaagaaagaaaacaatagtttcagaagcagaaagaggttttccgttccgaaacgatgtcctccatggccatcaccactagagacagagatcgagagcttctcatccccgtcgccgacacccccgccggcgatgccgccgtctccccttcccccaagccatcgtcgtcggcgtcgtccccgcatcattccggacgcgagactttttacaaagttgttagaagctgggcatcaaaaaagtttatgactggatgtgtcattctctttccaattgcaattaccttctatataacatggtggtttattcatttcgtggatggatttttttctcctatctatgctcagcttggaattgatatttttggtcttggattcataacttccataactttcatcttcttggtcggggttttcatgtcatcatggttgggtgcttctgtcctgggccttggggagtggtttatcaagcgaatgccacttgttcgtcatatttataatgcctccaagcagattagtgctgctatctctccagatcaaaatacacaagccttcaaagaagtagccatcattcggcatccacgtattggagaatatgcatttggattcatcacctcatctgttacccttcagaactattctggagatgaggagttatgctgtgtctatgttcctacaaatcatctttatattggtgatatatttcttgtcaacaccaaggatgtcattaggccaaacttatcaattcgtgaaggaattgagattgttgtttcgggaggcatgtcaatgccacagatcctatcaacgatcgattcacgcatcagacctggggaaataagtagaatcaacagaagctgagagtgaagggcgtattagtttttcatgttatagttccttggtatcttatgaagccatcagaatgacaatgcaatcattgtggtttggatgcaagtgttgaatatacgcgattgattgctctgagaaagttacatactctgatggcttgtgtaacattcgtttgagtaggaatgtagaatttagcatttgtttgacaaccttacagaattctattctctgcttggagtctcgaatttttacctgtgtataatgtactggttctccactcgttatagcaattcaattttgtagtggtgaaaaaaaaaaaaaaaaaaaaaaaaaaaaaaaaaaaagaaaaaaaaaaaaaaaaa

SEQ ID NO: 10460 - protein, 262 aa, Glycine max
  misc_feature: Ceres CLONE ID no. 1636640
  misc_feature: Ceres CDNA ID no. 36706860
  misc_feature: Homolog of GI Number: 20147285 NR Desc: At2g20120/T2G17.8
  misc_feature: Homolog of GI Number: 34908614 NR Desc: P0677H08.7
MAITTRDRDRELLIPVADTPAGDAAVSPSPKPSSSASSPHHSGRETFYKVVRSWASKKFMTGCVILFPIAITFYITWWFIHFVDGFFSPIYAQLGIDIFGLGFITSITFIFLVGVFMSSWLGASVLGLGEWFIKRMPLVRHIYNASKQISAAISPDQNTQAFKEVAIIRHPRIGEYAFGFITSSVTLQNYSGDEELCCVYVPTNHLYIGDIFLVNTKDVIRPNLSIREGIEIVVSGGMSMPQILSTIDSRIRPGEISRINRS

SEQ ID NO: 10461 - DNA, 1194 bp, Glycine max
  misc_feature: Ceres CLONE ID no. 1636645
  misc_feature: Ceres CDNA ID no. 29191793
  CDS (79)..(966): REFERENCED BY SEQ ID NO: 10462
tcattctctttctctacatttcattcattcttctccaattagggctttgcattttgcatttcactttctcattttcccatggctactcaccttcttcatatcgaacccgccgagctccggttcgtctttgaattgaagaaacaaagttcatgtttggttcaacttgccaacaacactgatcactttcttgcctttaaggtaaaaacaacttcacccaaaaaatattgcgtcaggcccaacataggcatcatcaagcccaatgataaatgtgattttactgttactatgcaagctcagcgcatggcaccgcctgatatgctgtgtaaagacaaatttcttattcagagcacagttgtcccggttggaaccacagaagatgacatcacctctgatatgtttgcaaaagacagtggaaagtttattgaggagaagaaactacgggtagtcctcatcagtccaccatcttctccggtgttgcttccagtaaatggtgatatgaagcatgatccatccaacgaaattaatgtgcaaaaagataggttgcccagtggagttgaaaacatacctccccctcgtaaagtttccgaggaggttaaaggtttggaaccagcccaggatatgaaggaggatagagcagatgaggatattgtcccaagacaagctgagaatgttggtgacatgaagccagcaaaagatgatgtgcagtcgaatttagccaatgaatctgaggaattgaagtcaaaacttagtgtaatggattcaaagctaagagaggctgaggtaaccatcacgaagctgaatgaggagaggcgcaggaacactcaagaaaaagatttgcttaagaaagagttggaggtgttgaagaggcaaatcaatacgaaaggaaatcaggctggttttccatttctgtttgtttgcatggttgctcttatcagtgtggcagttggatattatattcatccataagggagataactgcgtgtataggatagctgatggcagacgttctaaaatcatgggtttctccgtaatgactagatagaggatggttcatttgtctattgtgatggttttactggacagatgttaatatgtgatgtgggaagctatggaattgcatgtgaagtgaactaagcctttcaatagaagtatcacaagcagcattctgattctgataaaaaaaaaaaaaaaaaa

SEQ ID NO: 10462 - protein, 295 aa, Glycine max
  misc_feature: Ceres CLONE ID no. 1636645
  misc_feature: Ceres CDNA ID no. 29191793
  misc_feature (5)..(113): Pfam Name: Motile_Sperm PFAM Desc: MSP
  misc_feature: Homolog of GI Number: 57899194 NR Desc: putative VAP27
  misc_feature: Homolog of GI Number: 34907216 NR Desc: P0504E02.2
  misc_feature: Homolog of GI Number: 50941297 NR Desc: putative vesicle
  misc_feature: Homolog of GI Number: 9802569 NR Desc: F22O13.31
  misc_feature: Homolog of GI Number: 30680831 NR Desc: vesicle
  misc_feature: Homolog of GI Number: 25054852 NR Desc: putative proline
  misc_feature: Homolog of GI Number: 21592874 NR Desc: putative proline
  misc_feature: Homolog of GI Number: 17104633 NR Desc: putative VAMP
  misc_feature: Homolog of GI Number: 50941265 NR Desc: putative 27k vesicle
  misc_feature: Homolog of GI Number: 6688926 NR Desc: VAP27
  misc_feature: Useful for delaying flowering time
  misc_feature: Useful for increasing chlorophyll and photosynthetic capacity
MATHLLHIEPAELRFVFELKKQSSCLVQLANNTDHFLAFKVKTTSPKKYCVRPNIGIIKPNDKCDFTVTMQAQRMAPPDMLCKDKFLIQSTVVPVGTTEDDITSDMFAKDSGKFIEEKKLRVVLISPPSSPVLLPVNGDMKHDPSNEINVQKDRLPSGVENIPPPRKVSEEVKGLEPAQDMKEDRADEDIVPRQAENVGDMKPAKDDVQSNLANESEELKSKLSVMDSKLREAEVTITKLNEERRRNTQEKDLLKKELEVLKRQINTKGNQAGFPFLFVCMVALISVAVGYYIHP

SEQ ID NO: 10463 - DNA, 2074 bp, Zea mays
  misc_feature: Ceres CLONE ID no. 1638194
  misc_feature: Ceres CDNA ID no. 40041514
  CDS (309)..(1814): REFERENCED BY SEQ ID NO: 10464
aagcccctctcggccggctatcggcaaattcgacatccgctccgccgtctacagtctacataaggaatcgaggtagccccagtcgtcttcggcgctcaagtttcggccgccggccgcggtgccctccgccccttcccaatcctgcccccaagccccagtcagccatcgaaactccaacccccaggcggccaggcccaagcgtccggcggttgcggccccgcggcttggcgaaggcgaccggtggctaggccccagcgactcagggcggatcaagtaagatttgtagtttcaattaattaggcctgcagatgcacccccgatgcccggttttggatttcccactgccgatgcccgagatgaaggccgccactgcgctggggagctggctgctcccggctgcgcctgccattcgccccacactggtgaatctcagatcccgggggttctgcagtcatggttatttcccctcggcgtcccggatttcttgctcatcagagttatctgatagcgatagaggtctcgccaaggagatggagtcagaattcagtgacgagatatgtgccgagaatggtgctgaagaggacgatgaaacagaggatttaatttggagcaaagaagagatcgatgctatttcggcgctcttcgaccggccgatgcgccagaagcccctgaagccgcgaaaccccgcgaggcagagggcgcttccattgccactgccgcacaagacgaggctgcccgtggctcctgcgccgaagcagcacgtccgcctcgctgcaagagcggggctctcttctcgtgcttgcttcagcgaccaggtgcgcaagaaaccggagttccttctcgggattgcccgggagatcgcagcgcttcctcccgagcacgacgtctccacggtgctcgaccgttgggcgaggttcctccggaaaggctccctgtcacttaccattcgtgagctcgggcacatggggctccccgagcgcgcgctccagacactgtgctgggcccagaggcagaaagctgtgccgttgttccctgacgatcgtgttcttgcttcggccatcgaggttttggcacgctttgaacggctcagagtggagtctgcgctggagcaatgtgtgcccacggccagccgtgccgttctcgaggccatggcgagcgggttcatcagggcggggaaagtagaccgcgtgcgcaagctcctggaacttgcaaggatcaataacaggacgctgcaccccagcatctacgtgaagttgatgttggaagccacccggacacctgaaggctacgggcttgcgtcggcactggttgatgagcttggcgagaggccggagttggagttgcgtccacaggactgcacggctgtcatgaaggtctgcataaggctccgacggtacgcagccgtggagagccttttcagctggttcaggggggccattgggagccccaccgtggtgatgtacacgacggtgatccacagccggtgccgtgacgggaggcaccgagaggcactgtccctggtgtgggaaatggagcaggcaggctgcctgcttgatctgccggcctaccgagttatcgtcaagctatgcgtggcattgcacgatccggggagggctctccgctatctgtcaaggatgaaggaggctggttttattccaactggcgacatgtacgacagtctgatcgagggctatttggcagatgggaggctggccaagtgccgacagctgatcagagatgccgagtcagccggtgtgaagctggataggaggctgctttcgcggttgtctgaaactggaggcagacatccttagttgactctggtgagtgttgttgacatgtgttatgcacgggtaaaatccggacaggacaggaacaccacagaggaaaattatctctagcatttattgtagagtaatacaaagagtaatcttggcagaagattagtacgttgttgcccagtttccctttgtatttgtcagtaatccatgatttcatgacaacgatgaattgctggctgaaaaaaaaaaaaaaaaaaaaaaaaaaaaaaaaaaaagaaaaaaaaaaaaaaaaa

SEQ ID NO: 10464 - protein, 501 aa, Zea mays
  misc_feature: Ceres CLONE ID no. 1638194
  misc_feature: Ceres CDNA ID no. 40041514
  misc_feature (453)..(487): Pfam Name: PPR PFAM Desc: PPR repeat
  misc_feature: Homolog of GI Number: 50904803 NR Desc: putative pentatricopeptide
  misc_feature: Homolog of GI Number: 55733739 NR Desc: At2g01860
  misc_feature: Homolog of GI Number: 54695176 NR Desc: PPR566
MHPRCPVLDFPLPMPEMKAATALGSWLLPAAPAIRPTLVNLRSRGFCSHGYFPSASRISCSSELSDSDRGLAKEMESEFSDEICAENGAEEDDETEDLIWSKEEIDAISALFDRPMRQKPLKPRNPARQRALPLPLPHKTRLPVAPAPKQHVRLAARAGLSSRACFSDQVRKKPEFLLGIAREIAALPPEHDVSTVLDRWARFLRKGSLSLTIRELGHMGLPERALQTLCWAQRQKAVPLFPDDRVLASAIEVLARFERLRVESALEQCVPTASRAVLEAMASGFIRAGKVDRVRKLLELARINNRTLHPSIYVKLMLEATRTPEGYGLASALVDELGERPELELRPQDCTAVMKVCIRLRRYAAVESLFSWFRGAIGSPTVVMYTTVIHSRCRDGRHREALSLVWEMEQAGCLLDLPAYRVIVKLCVALHDPGRALRYLSRMKEAGFIPTGDMYDSLIEGYLADGRLAKCRQLIRDAESAGVKLDRRLLSRLSETGGRHP

SEQ ID NO: 10465 - DNA, 2174 bp, Zea mays
  misc_feature: Ceres CLONE ID no. 1638339
  misc_feature: Ceres CDNA ID no. 35383494
  CDS (339)..(1940): REFERENCED BY SEQ ID NO: 10466
aatccctccccggcattcattcccttgcccttttttcaccgaattgtagcggttgttgctttcctgttcaggtgccttgttcttggcctccttcgcacgcaaagaaccgccggtcgtattgctctccgcactcacccaccgcgctgctgctgctcgactgctcgtggaagggttcttattggccgcctgttcctgctttgcggtttcttgctctgcttttgagtggagccgctgtggagtggacggtgtggtgtggtgtgggtcggcggtgaggtgaaaggcttggtttctttctttcttgcgagggaggataagggaaagggaaggcgaagaggaggatggccggaggaggggcggcgccgccgccgaagcaggaggagctgcagccgcacccggtgaaggaccagcttcccagcgtgtcctactgcatcacaagcccaccgccctggcctgaggctgtcatccttggattccagcactacattgtgatgctgggcacatccgtcatcataccaagtgctcttgttccccagatgggaggaggaaacgaggagaaggccagggtgattcagacgctgctgttcgttgccggcatcaacaccctatgccagtcattctttgggactcgcctcccagcggtgatgggtggatcctacaccatcgtcgcacccaccatttccatcatcatggccggccgttacagcaacgaagcagaccctcgtgagaaattcttgcggaccatgcgaggaacacaaggcgctctcatcatcgcgtcgacaattcagatcgtgcttggtttcagtggcctttggcgcaatgtcgttaaattgctgagcccattgtctgctgtacctttggtttcgctagctggatttgggctatatgagctaggttttccaggggttgctaagtgtgtggaaattgggcttccggaaatcatcctaatgctcatattttctcagtacttacctcatgctgtccatgcggcaaagcctgtgttcgaccggttttctgtgattttcacaattgcgattgtatggctgtatgcgtacattctcacggttagcggtgcctacaagagtgcccgaacaaagacacaactccattgccgtgttgaccgctctgggcttgttggtggagctccttggattagtgtcccatatcctttccaatggggggccccaacatttgatgctggtgaatcatttgcaatgatggtggccgcatttgttgctcttgttgagtcatctggggccttcattgctgtgtcaagatatgcaagcgcgactatgatacctccttcagttcttggtcgtggcattggttggcagggcatcggtactttactgggtgcgttttttgggacagctaatggaactgcagtgtcagttgagaatgctggtctgcttgctttgacacatgttggcagccggagagtagtccagatatctgcaggcttcatgatcttcttctctgtccttgggaaattcggggcgatctttgcttcaatcccactgccgatattcgctgccctgtattgcattctctttgcatacattggtgcttgtggcctgagcttccttcagttctgcaacctgaacagcttcaggaccaagttcatcatggggttctccttgttcatgggcctgtcagtaccccaatacttcaacgagtacacgtccgtggctggctatggccccgtgcacaccggcgcccgatggttcaacgacatgatcaacgtgcccttctcgtcgaagccgttcgtggctgtgctggtggccttcttactggacaacacgatccaggtgcgtgacagcggcgtgaggagggacaggggctaccactggtgggacaagttccggagcttcaagacggacagccgcagcgaggagttctactcgctgcccttcaacctcaacaagtttttcccttccgtctgatcctgcagggtctgcacactcttcctcgcagccgcagtagccctgactggagtcaggcaagaaatgatcctatgcagatgatgctggagcatggactgatggcgttttgtacattcaggggtgaactgaactgtgcaggttgcaggggatagtgctctgggtagcatcagtattccctagtaaccgaaattgaaaaggccgcctgttaaacttctgcaaaaaaaaaaaaaaaaa

SEQ ID NO: 10466 - protein, 533 aa, Zea mays
  misc_feature: Ceres CLONE ID no. 1638339
  misc_feature: Ceres CDNA ID no. 35383494
  misc_feature (38)..(445): Pfam Name: Xan_ur_permease PFAM Desc: Permease family
  misc_feature: Homolog of GI Number: 31711940 NR Desc: At5g49990
  misc_feature: Homolog of GI Number: 21326025 NR Desc: putative permease 1
  misc_feature: Homolog of GI Number: 62733642 NR Desc: putative permease 1
  misc_feature: Homolog of GI Number: 50912631 NR Desc: putative permease 1
  misc_feature: Homolog of GI Number: 50900020 NR Desc: putative permease 1
  misc_feature: Homolog of GI Number: 62183958 NR Desc: putative permease I
  misc_feature: Homolog of GI Number: 34897392 NR Desc: putative permease
  misc_feature: Homolog of GI Number: 50945833 NR Desc: putative permease
  misc_feature: Homolog of GI Number: 30696385 NR Desc: xanthine/uracil permease family protein
  misc_feature: Homolog of GI Number: 15239419 NR Desc: xanthine/uracil permease family protein
MAGGGAAPPPKQEELQPHPVKDQLPSVSYCITSPPPWPEAVILGFQHYIVMLGTSVIIPSALVPQMGGGNEEKARVIQTLLFVAGINTLCQSFFGTRLPAVMGGSYTIVAPTISIIMAGRYSNEADPREKFLRTMRGTQGALIIASTIQIVLGFSGLWRNVVKLLSPLSAVPLVSLAGFGLYELGFPGVAKCVEIGLPEIILMLIFSQYLPHAVHAAKPVFDRFSVIFTIAIVWLYAYILTVSGAYKSARTKTQLHCRVDRSGLVGGAPWISVPYPFQWGAPTFDAGESFAMMVAAFVALVESSGAFIAVSRYASATMIPPSVLGRGIGWQGIGTLLGAFFGTANGTAVSVENAGLLALTHVGSRRVVQISAGFMIFFSVLGKFGAIFASIPLPIFAALYCILFAYIGACGLSFLQFCNLNSFRTKFIMGFSLFMGLSVPQYFNEYTSVAGYGPVHTGARWFNDMINVPFSSKPFVAVLVAFLLDNTIQVRDSGVRRDRGYHWWDKFRSFKTDSRSEEFYSLPFNLNKFFPSV

SEQ ID NO: 10467 - DNA, 2711 bp, Zea mays
  misc_feature: Ceres CLONE ID no. 1638491
  misc_feature: Ceres CDNA ID no. 40352064
  CDS (333)..(2204): REFERENCED BY SEQ ID NO: 10468
atggcatgggccactactgctagagctagtgctagtagcagcgtggagaggcagagaagtagccaaagccaagtaggaggaggaggaggagcggcaggtagggcgcggggcgagagcttgacgcggcaaccaccgctgcactgcactgcactgcaccccctagctcctccgagctcagcagctcgctcgcggcaagtcgccatccatgtcaggaaagatttatctggtcggccgatcgagctcctctccttctccgaagcactgaagctccagcggctgccctgcctgacagccacttcgcacgaccaaattaaaaagcgcgggcgatcgagatggcgcacgaccccagcctgggcttcgcggactacttctcggcggcggcggcggctgcggcggcgggcgccacggcgatggacgacgacgtcggggcgccggagctctatggcctgcatgccgacgacatggagttcctcggcatgcgtggcctggccgccatgccccctgccgcggcacaccaccaccaccaccaccatcacggccacagcaaggccggtgcgctcctcgacgacgacgacgcgggggtggggccagacgtcagcggctccgcggacgacgccaccatgcgcttcctgagcgagcagcagcagcagcagcagcaccaggcgccgctgtcgctgtcgctgtgccggccggacgtgacgacgacgttgcacgagcagcaccacctcgccggcggcggctcctcgtcccggtaccatcaggagcagcagccggcggcgtgggtgcagcagcagcagcacgactactcgccgtcgccgcagcagcacgcgtggcacctgcgcagctccaggttcctcgtcccggcgcagcaggtcctgcaggagttctgcagcctccccgtggacagcagcagcgctgccgcctccagcaagcgcgccaaggccgcaaataagccggccccgcagcagcagcaagaagacggcggcggcgccgaggggtcgtcgtcgtcggcctcctgggcgccgtcgccgcagatccaggccatggacgcgctggagctgcagcggctcaaggacaagctctacatcatgctggaagaggtggaccggagataccggcggtactgcgagcagatgcgggcgctggcgggcgggttcgaggcggtggccggggagcgcgcggcggcggcgtacacggcgctggcgtcgcgcaccatctcgcggcacttccggagcctccgggacggcgtggtggcgcagctgcaggcggcgcgcagggcgctcggggagaaggacgtggcggtgcccgggatgacgcgcggggacacgcccaggctcagggtgctcgaccagtgcatccgccagcacaaggcgctcacccaggccgccggcatgatggagagccacccgtggcgcccgcagcgcggactccccgagcgcgccgtcaccatcctccgggcgtggctcttcgagcacttcctgcacccgtatccaagcgacgtcgacaagcatatcctggctcgccagacgggcctctcacggagccaggtgtccaactggttcatcaatgcgcgggtcaggctctggaagccaatggtggaggagatgtacgtggaggagatgaaggccgagggccaggacggcgggggccagcagcaggtaggcgtcgccgtcgccaacaaccctaaccctagcagcgccggccacgcctccgaggcggctgaggacgatgggcgcggggacagcggcggcggcgccgtcgtcgaccggaagccgacgcgggcgcagctcctgcacgacgccggctcgctcgcctcggtcgtcaacatcggcggcggatcgcgcgcgggattcggcatcatggaccacctcgacttcgacgcctacggcggccaccacgcaggcgccgtgtccctcactctgggcctgcagcagcacgactcccacgccgacggcggcgccggcggcgtcaacatcgcgttcggcgcgccgccgcccgcgcaccaccacgggtacctgttcgctccgacggcggcggcggcaggccatcagatgggcggcggcgtgcacccgggactacaccaccacgtccagttcggcggcgccggcgccggcatcgacggcgaggcggcgcacgggcaggagcactaccggggcctgcagggcggcggcgggttccacctcctgcgtgacctggccgggtgatcgatctgctccatccaccgcccgtgcatccgcggtcggccgcgtgcgagctctagctgcgactccgagtgagctgtgagcgatggggacgtcgtgccggcgcctagctagctagctaccgggtgtccgccggattcatggcacgcactcgatcgcgcgtgcgctcatccggccacagcggcgctgtgtacgtacgcaccggatttgtttggcttgttgctcgtgccgctctccatcggtctcgatcgccgccggcggcggcttgtccgggcccgggtctagctggctagctagctgccctagttatacataatatatgtatttgtagcgtgtacagatcgggtcgcgatcgagcagtttggacgcgcgcaggtgcagctagtactagtagtagctagcccgccggaactgcgtagttgatcaaacacgcattgcatgcaggttaattgcattgtttgtcaatttcttgaaggattcgacgacgtacggcaaaaaaaaaaaaaaaaa

SEQ ID NO: 10468 - protein, 623 aa, Zea mays
  misc_feature: Ceres CLONE ID no. 1638491
  misc_feature: Ceres CDNA ID no. 40352064
  misc_feature (167)..(308): Pfam Name: POX PFAM Desc: Associated with HOX
  misc_feature (361)..(419): Pfam Name: Homeobox PFAM Desc: Homeobox domain
  misc_feature (384)..(419): Pfam Name: Homeobox PFAM Desc: Homeobox domain
MAHDPSLGFADYFSAAAAAAAAGATAMDDDVGAPELYGLHADDMEFLGMRGLAAMPPAAAHHHHHHHHGHSKAGALLDDDDAGVGPDVSGSADDATMRFLSEQQQQQQHQAPLSLSLCRPDVTTTLHEQHHLAGGGSSSRYHQEQQPAAWVQQQQHDYSPSPQQHAWHLRSSRFLVPAQQVLQEFCSLPVDSSSAAASSKRAKAANKPAPQQQQEDGGGAEGSSSSASWAPSPQIQAMDALELQRLKDKLYIMLEEVDRRYRRYCEQMRALAGGFEAVAGERAAAAYTALASRTISRHFRSLRDGVVAQLQAARRALGEKDVAVPGMTRGDTPRLRVLDQCIRQHKALTQAAGMMESHPWRPQRGLPERAVTILRAWLFEHFLHPYPSDVDKHILARQTGLSRSQVSNWFINARVRLWKPMVEEMYVEEMKAEGQDGGGQQQVGVAVANNPNPSSAGHASEAAEDDGRGDSGGGAVVDRKPTRAQLLHDAGSLASVVNIGGGSRAGFGIMDHLDFDAYGGHHAGAVSLTLGLQQHDSHADGGAGGVNIAFGAPPPAHHHGYLFAPTAAAAGHQMGGGVHPGLHHHVQFGGAGAGIDGEAAHGQEHYRGLQGGGGFHLLRDLAG

SEQ ID NO: 10469 - DNA, 1955 bp, Zea mays
  misc_feature: Ceres CLONE ID no. 1638542
  misc_feature: Ceres CDNA ID no. 35383495
  CDS (399)..(1799): REFERENCED BY SEQ ID NO: 10470
accccaacctctaaaccccgctctaataaatcttcctcccatctctctcgctcccaaccctcaagtccccaccaacccaaccctggtggcaccggccgcacacaccaaagcaagctagctagtcactattagagctatttggttgggagcagtttagctcagcaagatcgaactggcattgtcacacacatctcagctccttgggttttccctctccatgagcagcagccacacattgccgtcttccttgctgcacttgtagttacagctagatccatctccccgccacttgattttttggcaagaacaagagcaggagctactgagcaagaagtaagtgcgtacgtgcttagtgagttatacttatactagcttgcgggcgggcgggcgcggctgcgatggagctggtgactatcgtgacgctgacgctactggcgtactcggcggcgatgctggcgcgggtgctggtggcgcgcgcgcagcggcgtcggtgctacctgctggactacgtgtgctacaaggctacggacgaccggaagctgccgacggacctgtgcggcgagatcatccagcggaacaagctgctggggctggaggagtacaagttcctgctgaaggtgatcgtgaactcgggcatcggcgaggagacgtacggcccgcgcaacatgatcgagggcggggaggcccggccggaccgcctccgcgagggcatggaggagatggacgagaccttccacgccgtcctcgacgagctcttcgcccggtcggcggcgcccggcggcgtcggcatccgccccgccgacgtcgacgtgctcgtcgtcaacgtgtccatgttctcgccggcgccgtccctgtcggcgcgcgtcgtgcggcgctacggcctccgcgaggacgccaaggtgtacaacctcacgggcatgggctgcagcgccacgctcatcgcgctcgacctcgtcaacggctacttcaggacgcacgcggggcaggtggctctagtgatgacatcggagtcgatcgcgcccaactggtacgcgggcaacaagcgcaccttcatgctgggcaactgcctgttccgctccggcggctgcgcctacttcctgaccaacgacccgcggctccggccgcacgccaagctccgtctccgccacgtggtgcgcacccacacgggcgcctccgacgaggcctacaactgcgcgctccagatggaggacgaggccggccgcccggggttccacctgggcaaggagctgccgcgcgccgcggtgcacgccttcgtgcacaacctccgcgtgctggcgccccgcgtgctgccgctcccggagctgctccgcctcgcctgcgccaccctctcggcgcgcctggcgcgcaagaagcggcagcgcggcgcgggccatggccatggccacctcaccatccgcatgaaggccggcgtcgaccacttctgcgtgcacacgggcggcgccgccgtcatcgacggcgtcggcaagggactcacgctcacggagcacgacctggagccctcccgcatgacgctgcaccgcttcggcaacacctccgccagcagcgtctggtacgtgctcgcctacatggaggccaagggccgcctgcgccagggcgaccgcgtcctcatgctcaccttcggcgccggattcaagtgcaacagctgcgtctggaccgtcgagaggcccgccaccgacgccggcgtctggaaggaccgcatccaccactacccgctcaaggacgtctccaacccattcatggacaagtacggattcgtcaaggacctcatagacttgtgatcgcccctagctgctgctgctcaactcaaccccaccaacgcacatactttttatttacaccattattattgtattcattgtcatgttagtactactctgttctagtattcagcaactactagttaattaaaaaaaaaagaaaaaaaaaaaaaaaaa

SEQ ID NO: 10470 - protein, 466 aa, Zea mays
  misc_feature: Ceres CLONE ID no. 1638542
  misc_feature: Ceres CDNA ID no. 35383495
  misc_feature (350)..(397): Pfam Name: Chal_sti_synt_C PFAM Desc: Chalcone and stilbene synthases
  misc_feature: Homolog of GI Number: 50915800 NR Desc: putative fatty acid elongase 3
  misc_feature: Homolog of GI Number: 31432631 NR Desc: putative fatty acid elongase 3
  misc_feature: Homolog of GI Number: 20259583 NR Desc: putative fatty acid elongase
  misc_feature: Homolog of GI Number: 50920821 NR Desc: putative fatty acid elongase
  misc_feature: Homolog of GI Number: 21536949 NR Desc: putative fatty acid elongase
  misc_feature: Homolog of GI Number: 28951053 NR Desc: At5g04530
  misc_feature: Homolog of GI Number: 50920841 NR Desc: putative fatty acid elongase
  misc_feature: Homolog of GI Number: 4091810 NR Desc: fatty acid elongase 3
  misc_feature: Homolog of GI Number: 20465993 NR Desc: putative fatty acid elongase 3
  misc_feature: Homolog of GI Number: 49355351 NR Desc: fatty acid elongase 3
MELVTIVTLTLLAYSAAMLARVLVARAQRRRCYLLDYVCYKATDDRKLPTDLCGEIIQRNKLLGLEEYKFLLKVIVNSGIGEETYGPRNMIEGGEARPDRLREGMEEMDETFHAVLDELFARSAAPGGVGIRPADVDVLVVNVSMFSPAPSLSARVVRRYGLREDAKVYNLTGMGCSATLIALDLVNGYFRTHAGQVALVMTSESIAPNWYAGNKRTFMLGNCLFRSGGCAYFLTNDPRLRPHAKLRLRHVVRTHTGASDEAYNCALQMEDEAGRPGFHLGKELPRAAVHAFVHNLRVLAPRVLPLPELLRLACATLSARLARKKRQRGAGHGHGHLTIRMKAGVDHFCVHTGGAAVIDGVGKGLTLTEHDLEPSRMTLHRFGNTSASSVWYVLAYMEAKGRLRQGDRVLMLTFGAGFKCNSCVWTVERPATDAGVWKDRIHHYPLKDVSNPFMDKYGFVKDLIDL

SEQ ID NO: 10471 - DNA, 965 bp, Zea mays
  misc_feature: Ceres CLONE ID no. 1638614
  misc_feature: Ceres CDNA ID no. 36707557
  CDS (95)..(496): REFERENCED BY SEQ ID NO: 10472
aaactctgagataggaggtgggattgcagagtcacgcgtcagttcgttccctcctctgtgtaccggccagtaaaatccgaacccacagcgagaaatggcggcggcagcgctccgtccggcgatcctccgccgcatccgcctctccccctcccctttgctcgccctcgccgccgctgggacaggtgcatcccacccgcacgcgctggggcggtggctcgcgcggcccatgtcctcccacgacgcgcacctcacccgcgacgaagtcatcgaccggatcctcgacgtcatcaagagccaccccaagatcgacccctccaaggtgaccccggaggcgcacttcgagaaggatctggggctcgacagcctggacaccgtcgaggtggtcatggccatcgaggaggagttcaagctcgagatcccagacatggaggctgacaagatcgactcactccctctggccatcgagtacgtcgccaaccaccccatggctggctgagcctctgctcgcccgagaggaggcgagttgaggtgaggcttcgcttggttttgtttccgagggcaaataatctgctggagtggcacaaaaaaacttgttcctggtgctctgcattgcttcacggtgacggatgatgatgtcgaaatggaacattaacattttcagcgttagattgttgtttttgtgtgcgtgttatatctatatatactggttgacaaactagtttggttgattgagtctgatcgttattgggttatttgaattgggttcgtgatagtttcccatgatattttatctgttttccatgtgcttttgggaacctaaattgataagaacggcttacaaggattgatgtaggttaaaagtctcagggttcatgacagctgttagtgtggcctcttgttgtccaactcttgttcctgttaatgaggcttgagtctgttttatttgccaaaaaaaaaaaaaaaaa

SEQ ID NO: 10472 - protein, 133 aa, Zea mays
  misc_feature: Ceres CLONE ID no. 1638614
  misc_feature: Ceres CDNA ID no. 36707557
  misc_feature (59)..(126): Pfam Name: PP PFAM Desc: Phosphopantetheine attachment site
  misc_feature: Homolog of GI Number: 34900336 NR Desc: putative acyl carrier protein
  misc_feature: Homolog of GI Number: 3341682 NR Desc: acyl carrier protein
  misc_feature: Homolog of GI Number: 16974477 NR Desc: At2g44620/F16B22.11
  misc_feature: Homolog of GI Number: 21553376 NR Desc: acyl carrier protein
  misc_feature: Homolog of GI Number: 3335337 NR Desc: Similar to acyl carrier protein
  misc_feature: Homolog of GI Number: 73544177 NR Desc: acyl carrier protein
  misc_feature: Homolog of GI Number: 53801502 NR Desc: mitochondrial acyl carrier protein
  misc_feature: Homolog of GI Number: 70879980 NR Desc: acyl carrier protein
  misc_feature: Homolog of GI Number: 34485510 NR Desc: acyl carrier protein 1
MAAAALRPAILRRIRLSPSPLLALAAAGTGASHPHALGRWLARPMSSHDAHLTRDEVIDRILDVIKSHPKIDPSKVTPEAHFEKDLGLDSLDTVEVVMAIEEEFKLEIPDMEADKIDSLPLAIEYVANHPMAG

SEQ ID NO: 10473 - DNA, 963 bp, Zea mays
  misc_feature: Ceres CLONE ID no. 1638634
  misc_feature: Ceres CDNA ID no. 35383496
  CDS (57)..(668): REFERENCED BY SEQ ID NO: 10474
agccacacacagtacgtacaagcctcatcagctcgctagcatagcagcaaccagcaatggactccaccaagttatccgcgctgctggcgctcgccatgctcgcgctctcctcgtcgccgctcgctctcgcgtgggagaaggcggagccggaatgccactcgtgcgagtccggctcgccgccctcgaccggcgtccccctgcccccaatcagcataccgtcagtcccactgccccctgtcagtataccgtcggtccccatcccaccggtcacccagctgcccccagtcgtcggactgccgccggtgacccttcctcccattccgatcatcggaggaagcccgccgaagaagggccaccggaaggcgtgcccgccgcctccgtctcccccgacgcccacgcccacgcccacgccgtcctcggacaagtgccccatcgacgcgctgaagctcggcgcgtgcgtggacattctcgggaacgaggtgcacatcggcgacgccaacgtcaagtgctgcccgctcgtgaagggcatcgccgggctctccgcggcggcgtgcctgtgcaccgccatcaaggccaaggtgctggacatttccgtctacgtgcccatcgcgctggaggtgctcgtcaactgcggctgcgaggtcccgccaggctacaaatgcacttaaacgactccattccatttcatcccatctcaccatgcgtgcacagcgaggtctccttttgccctcccgaatgcaaagtttgaaaggctcgtcgacggatttgggtctccttttgcccacccgaatgcaaagtttcgaaggctcgtcgacggattgggctcttcggctactgcattcttccttatttcattcttccttagtgtcttctcaaatgtcactttgtactttgtgtgaacctgtatcaaactttttttagttggattcgattattgtttgaagtgaaaaaaaaaaaaaaaaa

SEQ ID NO: 10474 - protein, 203 aa, Zea mays
  misc_feature: Ceres CLONE ID no. 1638634
  misc_feature: Ceres CDNA ID no. 35383496
  misc_feature (124)..(202): Pfam Name: Tryp_alpha_amyl PFAM Desc: Protease inhibitor/seed storage/LTP family
  misc_feature: Homolog of GI Number: 50929129 NR Desc: OSJNBa0033G05.15
  misc_feature: Homolog of GI Number: 34898430 NR Desc: Similar to Zea mays PRP gene.
  misc_feature: Homolog of GI Number: 55741420 NR Desc: putative prolin rich protein
  misc_feature: Homolog of GI Number: 17154773 NR Desc: extensin
  misc_feature: Homolog of GI Number: 2578444 NR Desc: ptxA
  misc_feature: Homolog of GI Number: 51535472 NR Desc: putative cell wall protein
  misc_feature: Homolog of GI Number: 7268262 NR Desc: cell wall protein like
  misc_feature: Homolog of GI Number: 3818416 NR Desc: proline
  misc_feature: Homolog of GI Number: 1155068 NR Desc: cell wall
  misc_feature: Homolog of GI Number: 4206763 NR Desc: cell wall
  misc_feature: Useful for making bigger plants
MDSTKLSALLALAMLALSSSPLALAWEKAEPECHSCESGSPPSTGVPLPPISIPSVPLPPVSIPSVPIPPVTQLPPVVGLPPVTLPPIPIIGGSPPKKGHRKACPPPPSPPTPTPTPTPSSDKCPIDALKLGACVDILGNEVHIGDANVKCCPLVKGIAGLSAAACLCTAIKAKVLDISVYVPIALEVLVNCGCEVPPGYKCT

SEQ ID NO: 10475 - DNA, 994 bp, Zea mays
  misc_feature: Ceres CLONE ID no. 1638636
  misc_feature: Ceres CDNA ID no. 36707448
  CDS (62)..(799): REFERENCED BY SEQ ID NO: 10476
aaaaacgccacttgttctccctccctctctgcctgaccagctaggatcagcggaagcagcaatggtgatggcgtcgtcgagcgggctgaggagctgcagcgccgtgggcgtgcccagcctgctggcgccgtcgtcccggtccggccgcctggcgccgttctgcgccaacgccaccacctctggccgcgtcaccatgtccgcggagtggatgcccggccagccacgccctgcccacctcgacggctcctctcccggggacttcggcttcgatccgctgggcctcgcgaccgtgccggagaacttcgagcggttcaaggagtcagaggtgtaccactgccgctgggccatgcttgccgtccccgggatcctggtgccggaagctctgggcctgggcaactgggtgaaggcgcaggagtgggcggccgtccccggcgggcaggccacgtacctgggcgccccggtgccgtggggcacgctgccgaccatcctggtgatcgagttcgtggccatcgccttcgccgagcaccagcgcaccatggagaaggaccccgagaagaagaagtaccccggcggcgccttcgacccgctcggcttctccaaggaccccgccaagttcgaggagtacaagctcaaggagatcaagaacggccgcctcgccatgctggccttcgtcggcttctgcgtccagcagtcggcgtaccccggcaccggcccgctggagaacctcgcctcccacctcgccgacccgtggcacaacaacatcggcgacatcatcatccccagatcaatctccccttgagctcagctcagctgctggttgctgtttcctgtgtacgactaggccctgcctgtacaacgagcgacgacggtgacttcccgcccggaaattaaaccctcgtaatgtaaagcttatgttattaagtagcggctactcttgtagtcttgtctgtatcaaatataaactggtttgttagctcaaaaaaaaaaaaaaaaa

SEQ ID NO: 10476 - protein, 243 aa, Zea mays; identical to SEQ ID NO: 9620
  misc_feature: Ceres CLONE ID no. 1638636
  misc_feature: Ceres CDNA ID no. 36707448
  misc_feature (52)..(209): Pfam Name: Chloroa_b PFAM Desc: Chlorophyll A
  misc_feature: Homolog of GI Number: 54290899 NR Desc: chlorophyll a/b
  misc_feature: Homolog of GI Number: 6685157 NR Desc: chlorophyll a/b binding protein precursor
  misc_feature: Homolog of GI Number: 544700 NR Desc: light
  misc_feature: Homolog of GI Number: 493723 NR Desc: photosystem I light
  misc_feature: Homolog of GI Number: 170388 NR Desc: chlorophyll a/b
  misc_feature: Homolog of GI Number: 82079 NR Desc: chlorophyll a/b
  misc_feature: Homolog of GI Number: 13265501 NR Desc: AT3g54890
  misc_feature: Homolog of GI Number: 23507771 NR Desc: At3g54890/F28P10_130
  misc_feature: Homolog of GI Number: 115764 NR Desc: Chlorophyll a
  misc_feature: Homolog of GI Number: 20788 NR Desc: Type 1 chlorophyll a /b

SEQ ID NO: 10477 - DNA, 942 bp, Zea mays
  misc_feature: Ceres CLONE ID no. 1638655
  misc_feature: Ceres CDNA ID no. 40352065
  CDS (109)..(693): REFERENCED BY SEQ ID NO: 10478
aactcgcttgagcatcgtgtgctcttctcttcctcttccagttggtattctttatctgaaagactgaaacatagtacagaggaggagaggagagcgagagctaagaagatgaccggcaaggtcctgcttgtggccgtcctcttggtgggcgtggcctctcgatgctcgggcagtaggggcctgcagggcgatcacgttgctgaacagaagttcggtggcggtggctatggaggtggcggtgggtacggaggctacggtggcggtggaggaggaggtggcggtgggtatggcggtggcggcggcggcggcgggtacggaggcggtggcggctacacacccggctactctggcaccggcacctgcgactactggaagagccacccggacgccatcatctcgtgcatcgggtcgctgggcagcatcctcggctccttcggcgacgtgtgcagcgccttcttcgggagcaagctgcagacgctgcaggacgcgctgtgcaacacccgcaccgactgctacggcgacctgctccgcgagggcgccgcggcctacctcaactccatcgccgccgagaagtacgcctacagcacgcagcaggttcaggactgcatcgccgtcgcgctcacttccaaggccgccgccgtcgcgcaggccgccatgttcaagaaggccaactacgcctgcagctactactagacctcgcgcatcatcagcgcataatgttctttagataattccatacgtatatgggtgtgcaaggtccagaccgaccagctgtatgtcttcatcgttgccttcgtttctgcgtcgtcttcccatgcatgtttatgcatgatgccgtgccgtcgttgtcagctggttcagtagtgatgcttactttcttgtcgttgctgctgatgtaagaaataagacgatgcgttgactgctcaaaaaaaaaaaaaaaaa

SEQ ID NO: 10478 - protein, 194 aa, Zea mays
  misc_feature: Ceres CLONE ID no. 1638655
  misc_feature: Ceres CDNA ID no. 40352065
  misc_feature (1)..(83): Pfam Name: GRP PFAM Desc: Glycine rich protein family
MTGKVLLVAVLLVGVASRCSGSRGLQGDHVAEQKFGGGGYGGGGGYGGYGGGGGGGGGGYGGGGGGGGYGGGGGYTPGYSGTGTCDYWKSHPDAIISCIGSLGSILGSFGDVCSAFFGSKLQTLQDALCNTRTDCYGDLLREGAAAYLNSIAAEKYAYSTQQVQDCIAVALTSKAAAVAQAAMFKKANYACSYY

SEQ ID NO: 10479 - DNA, 845 bp, Zea mays
  misc_feature: Ceres CLONE ID no. 1638703
  misc_feature: Ceres CDNA ID no. 40041515
  CDS (86)..(661): REFERENCED BY SEQ ID NO: 10480
aatcaactcgcaattccgcattcgttccaactcctgagcactttctcctcgtcccagacaagccaatcgaagccgagatacgaccatggactccaccggcaccggagcagggggtaaggggaagaagggagcggccgggcgcaaggtcggcgggccaaggaagaagtcggtgtcgaggtccgtgaaggccggtctccagttccccgtcggccgcatcgggcgctacttgaagaagggccgctacgcgcagcgtgtcggcaccggcgcccccgtctacctcgccgctgtcctcgaatacctcgccgctgaggtactgcaatttgagcccagttctttgtttgtactgatttggcgacggagtattaattcttgcgtcccgattcgttttgcttccttgtttgaccaggttctggagctcgccggtaatgctgccagggacaacaagaagactcgcattattccgcgccacgtgcttctggcgatccggaacgacgaggagcttgggaagctgttgggcggcgtgaccatcgctcacggcggtgtgctccccaatatcaaccctgttctgctgcccaagaagacggcggagaaggcgtccagtggcgggagcaaggaggcaaagtcgcccaagaaggccgccaagtcccctaagaaggcatagactgactgtccggagtgatctgatgtttagcagtaccttgttaccagtatgcggtgatgcgtaggctgcagatgggacgaatgtgcttgtatgtgtatgtgtcctgctgcaagttgtcctttgctatttagaatggaaggagaaatgccttgtttctctgaggttacaaaaaaaaaaaaaaaaa

SEQ ID NO: 10480 - protein, 191 aa, Zea mays
  misc_feature: Ceres CLONE ID no. 1638703
  misc_feature: Ceres CDNA ID no. 40041515
  misc_feature (31)..(78): Pfam Name: Histone PFAM Desc: Core histone H2A/H2B/H3/H4
  misc_feature: Homolog of GI Number: 50931107 NR Desc: putative histone H2A
  misc_feature: Homolog of GI Number: 20334750 NR Desc: At1g08880/F7G19_24
  misc_feature: Homolog of GI Number: 21553797 NR Desc: histone H2A
  misc_feature: Homolog of GI Number: 77555982 NR Desc: histone h2a.
  misc_feature: Homolog of GI Number: 3204129 NR Desc: histone H2A
  misc_feature: Homolog of GI Number: 21593507 NR Desc: putative histone H2A
  misc_feature: Homolog of GI Number: 72169566 NR Desc:  similar to H2A histone family
  misc_feature: Homolog of GI Number: 72105009 NR Desc:  similar to histone H2A
  misc_feature: Homolog of GI Number: 729671 NR Desc: Histone H2A
  misc_feature: Homolog of GI Number: 62087582 NR Desc: H2A histone family
MDSTGTGAGGKGKKGAAGRKVGGPRKKSVSRSVKAGLQFPVGRIGRYLKKGRYAQRVGTGAPVYLAAVLEYLAAEVLQFEPSSLFVLIWRRSINSCVPIRFASLFDQVLELAGNAARDNKKTRIIPRHVLLAIRNDEELGKLLGGVTIAHGGVLPNINPVLLPKKTAEKASSGGSKEAKSPKKAAKSPKKA

SEQ ID NO: 10481 - DNA, 1097 bp, Zea mays
  misc_feature: Ceres CLONE ID no. 1638742
  misc_feature: Ceres CDNA ID no. 40041516
  CDS (80)..(910): REFERENCED BY SEQ ID NO: 10482
aaagctacggcgagctactaggcgaagtagaattattcctggggccgcgcggcagctagctcctagctcgcagccggccatggcgaagccgcaggaggtccgcagcgttgactccttctcgcagctaccgttcatccggccggcgccggcgccgagggacgccaccatccgtctgtttggccgcgagttccccagcgaccacaaccagcagcagcaggacgccgcgtccgactcccccgacgctgccaacaacggcagcacggtcacgtgcgagagcaacggcgcggccaagagcggcgccgcggccgagaggaagttcgagtgccactactgctgccgcaacttcccgacgtcgcaggcgctgggcgggcaccagaacgcgcacaagcgcgagcgccagcacgccaagcgcgcccacctccaggcctccctcgccatgcaccgctacgtgcccggacacatgtacggcctcttcaactactacccccacccccaccccgcgccgccgccgccgccgctgcagcactacccgatgtggacgacgagcgccagccccgcggggccctacggcggcggtggcggcccgggctccatgtcgcagccaatcaacggtagcccggtgcccgcggggctctggagggtgccgccgccccccgcggctactgccatggagaatttcggcgtgtccgcccggcacggcgctagtggtggcacggccttcccggtcgggccgcctggtggggaggcagcagcgtgcaaggacgataaggcggcggtgatgatgagcttgctgtccccctccccctcgctctcgtcgtgctcgtccacgtcgccggagacgaagctagcaggtaggtatgaactggcccgccagaaggagactgttgttagcttggacctccatttgtaatcctttcttgtttatttatttacatagtaggtctccgatctctcccgtcgttgtggattagcagtcgcaagcgcgtgtcaattctcatagtttttctaaataatcgtttctacgtacccccttttattatgccgtacgtctgaaatccaagttcttcctattttctgctgaaaaaaaaaaaaaaaaa

SEQ ID NO: 10482 - protein, 276 aa, Zea mays
  misc_feature: Ceres CLONE ID no. 1638742
  misc_feature: Ceres CDNA ID no. 40041516
  misc_feature: Homolog of GI Number: 50913293 NR Desc: putative zinc finger protein
  misc_feature: Homolog of GI Number: 18390109 NR Desc: putative zinc finger protein
  misc_feature: Homolog of GI Number: 46981882 NR Desc: putative zinc finger protein
  misc_feature: Homolog of GI Number: 50946585 NR Desc: putative zinc finger protein
  misc_feature: Homolog of GI Number: 51536147 NR Desc: zinc finger protein
  misc_feature: Homolog of GI Number: 51091156 NR Desc: zinc finger protein
  misc_feature: Homolog of GI Number: 1871188 NR Desc: putative C2H2
  misc_feature: Homolog of GI Number: 790687 NR Desc: zinc finger protein
  misc_feature: Homolog of GI Number: 32362299 NR Desc: At3g58070
  misc_feature: Homolog of GI Number: 6729550 NR Desc: zinc finger
MAKPQEVRSVDSFSQLPFIRPAPAPRDATIRLFGREFPSDHNQQQQDAASDSPDAANNGSTVTCESNGAAKSGAAAERKFECHYCCRNFPTSQALGGHQNAHKRERQHAKRAHLQASLAMHRYVPGHMYGLFNYYPHPHPAPPPPPLQHYPMWTTSASPAGPYGGGGGPGSMSQPINGSPVPAGLWRVPPPPAATAMENFGVSARHGASGGTAFPVGPPGGEAAACKDDKAAVMMSLLSPSPSLSSCSSTSPETKLAGRYELARQKETVVSLDLHL

SEQ ID NO: 10483 - DNA, 945 bp, Zea mays
  misc_feature: Ceres CLONE ID no. 1638786
  misc_feature: Ceres CDNA ID no. 40041517
  CDS (72)..(797): REFERENCED BY SEQ ID NO: 10484
aagccatcacacgcacgcatacacagcacagagtgaggtaagcatccgaaaaaagctgtgatctgatcgacatggccgccgccaccatggctctcacctcccgcgcgctcgtcggcaagccggcgaccagcaccagggacgtcttcggcgaggggcgcatcaccatgcgcaagactgctggcaagcccaagccagcggcgtccggcagcccctggtacggggccgaccgcgtcctgtacctgggcccgctgtccggccagcccccaagctacctgaccggcgagttccccggcgactacggctgggacaccgcggggctgtccgccgacccggagactttcgccaagaaccgcgagctggaggtgatccactgccgctgggccatgcttggcgcgctcgggtgcgtgttcccggagctgctcgcccgcaacggcgtcaagttcggcgaggccgtgtggttcaaggccgggtcccagatcttcagcgagggcgggcttgactacctcggcaacccgagcctgatccacgcgcagagcatcctggccatctgggcgtgccaggtggtgctcatgggcgccgtcgaggggtaccgcatcgccgacgacccggaggcgttcgcggagctcaaggtcaaggagatcaagaacggccgcctcgccatgttctccatgttcggcttcttcgtgcaggccatcgtcaccggcaagggtcccgttgagaacctcgccgaccacctcgctgaccctgtcaacaacaacgcctgggcctacgctaccaacttcgtccccggcaagtgagcgagggcatatacatacttgtatgcgtgtaccgtagacatacgtattcgtatatgtactgcaggagatgtaccagtatttgtgaagcagggagcatgggctcagagattgtaaaaaaaaaaaaaaaaaaaaaaaaaaaaaaaaaaaa

SEQ ID NO: 10484 - protein, 241 aa, Zea mays
  misc_feature: Ceres CLONE ID no. 1638786
  misc_feature: Ceres CDNA ID no. 40041517
  misc_feature (63)..(177): Pfam Name: Chloroa_b PFAM Desc: Chlorophyll A
  misc_feature: Homolog of GI Number: 53793541 NR Desc: putative a/b
  misc_feature: Homolog of GI Number: 34912356 NR Desc: putative chlorophyll a/b
  misc_feature: Homolog of GI Number: 34910682 NR Desc: chlorophyll a/b binding protein
  misc_feature: Homolog of GI Number: 22228 NR Desc: chlorophyll a/b binding protein precursor
  misc_feature: Homolog of GI Number: 20182 NR Desc: chlorophyll a/b
  misc_feature: Homolog of GI Number: 50252362 NR Desc: putative chlorophyll a
  misc_feature: Homolog of GI Number: 1661160 NR Desc: chlorophyll a/b binding protein
  misc_feature: Homolog of GI Number: 227611 NR Desc: chlorophyll a/b binding protein 1
  misc_feature: Homolog of GI Number: 22355 NR Desc: light
  misc_feature: Homolog of GI Number: 22357 NR Desc: LHCP
MAAATMALTSRALVGKPATSTRDVFGEGRITMRKTAGKPKPAASGSPWYGADRVLYLGPLSGQPPSYLTGEFPGDYGWDTAGLSADPETFAKNRELEVIHCRWAMLGALGCVFPELLARNGVKFGEAVWFKAGSQIFSEGGLDYLGNPSLIHAQSILAIWACQVVLMGAVEGYRIADDPEAFAELKVKEIKNGRLAMFSMFGFFVQAIVTGKGPVENLADHLADPVNNNAWAYATNFVPGK

SEQ ID NO: 10485 - DNA, 945 bp, Zea mays
  misc_feature: Ceres CLONE ID no. 1638787
  misc_feature: Ceres CDNA ID no. 29191352
  CDS (161)..(811): REFERENCED BY SEQ ID NO: 10486
aatctggcagccggccggtcggtcggtactctgctctagaagctagagagatactactctgcaggctagctagctagctagctagaggtagaagaggccggcccggcccggcccgattgaagaataacatagagctgtctgctgctgagcgacgacggcgatggtgctctacttcaaggcgcgtccggacgccggcgactacaccatctacatgggcgccgacaagaacgagaacgaggagctcatcaaatacggcctccccgaggacgtctggttccatgtggacaaggtatcctcggcacacgtctacctgaggctaaagaaaggtgagacgatacacaccatcagcgaggccctcctggaggactgcgcgcagctcgtcaaggctcactccattcaagggaacaagatgaacaacgtcgaggtgatctacacgccctgggctaatctcaagaagtccccatccatggatgtcggccaggttggcttccacaacccgcggatggtacatgtgcttatagtcgagaagcgtgtcaacgagatcatcaacaggctgaataaaacccgggtagaacgccgggcgccagacttgaaagccgagaaagaggcatcaaatgcagcagaaaaggccgagaggaagatgcagctgaaagagaagaaacggaaggaggagatggaaaggctggagaaggagaaatgggcggagatacggagctacaagggcctcatggtggccgagaagatgacgtccaaccgccagatcgcctccgccggcaagtccatgcaggaaatggaggatgagttcgtctgaagacgactgtcatcgtcactggagtctacatctctctctctctctctgtctgtgtgtgtgttgtgtgtgtacgtacatatgtccatgctcgcgtgataacgacgagtcgaagcaaccaaaaaaaaaaaaaaaaa

SEQ ID NO: 10486 - protein, 216 aa, Zea mays
  misc_feature: Ceres CLONE ID no. 1638787
  misc_feature: Ceres CDNA ID no. 29191352
  misc_feature: Homolog of GI Number: 34909556 NR Desc: P0046E05.9
  misc_feature: Homolog of GI Number: 62661649 NR Desc:  similar to RIKEN cDNA 2610528H13
  misc_feature: Homolog of GI Number: 73993916 NR Desc:  similar to coiled
  misc_feature: Homolog of GI Number: 29165654 NR Desc: FLJ10853 protein
  misc_feature: Homolog of GI Number: 57112411 NR Desc:  similar to FLJ10853 protein
  misc_feature: Homolog of GI Number: 55630404 NR Desc:  similar to FLJ10853 protein
  misc_feature: Homolog of GI Number: 72088443 NR Desc:  similar to CG4593
MVLYFKARPDAGDYTIYMGADKNENEELIKYGLPEDVWFHVDKVSSAHVYLRLKKGETIHTISEALLEDCAQLVKAHSIQGNKMNNVEVIYTPWANLKKSPSMDVGQVGFHNPRMVHVLIVEKRVNEIINRLNKTRVERRAPDLKAEKEASNAAEKAERKMQLKEKKRKEEMERLEKEKWAEIRSYKGLMVAEKMTSNRQIASAGKSMQEMEDEFV

SEQ ID NO: 10487 - DNA, 1053 bp, Zea mays
  misc_feature: Ceres CLONE ID no. 1638799
  misc_feature: Ceres CDNA ID no. 40041518
  CDS (340)..(654): REFERENCED BY SEQ ID NO: 10488
aatcagtactcggcatccaccccagccgatgacactctctgctcctctctccgtccctgctcatctcccgcgcgcttgcttgcttccctgcccagctcggccttcagctcgtcgagtcccttcccgctgcgcccttgccggttctctgctcggccatggaaatcgcaacccccagcttcctctgtcgagtccggccggagctccctcctgctttgctcgtcggctgcgcgagctagccggcgtgctcctgctccagccttaacgcgcgcgcctgctctctctgtccggccaccctcgccccacctctctcctttgtcggcgctctgtccagtctcctccatggccgcgcctggtccctacttgagctcggctctgccctctactccagctcgtccctctctgttgttctcgctgttgggccggtctacagctcgccgttgcccatggccgccatcgagcttcctgctcacgcctatctccctcccatgcgcgcgtgaggtcgacagtgatcccggtcctagctcggatcttgctcctgttcaccggcctcgcgcactactgtcggtggacgctatcatcgccagcgactcgattctcctccgctgcgttggtcgtgcttgtcgtggccaggccacaaaccttcctcaagcatgagcatgacatcgccttagagtcaaacccctaactgctactccatcatcgttgtcgttcgcctctataacgtgctcagcagcgtcgtgtcatggagcgcgatagggaacaccttggtcgcgtgctccaccgtgtcgagctccttggcgtcgctcgccctgttgttccctatcgggctcaccccagccgttcttctgctcctcgcatcgtgattgccgagttcatcggcaaccacagtcacgtcgtgccgcgccgcgagttcgctccccgctatcgtcgtttcctcgtgtccgctggccgtgcgcccctacagctccctgttcggcaaaatgagtggaccggtgctcatcgcgtgttggaaagatcggcaccgatgttcttgccgaaaaaaaaaaaaaaaaa

SEQ ID NO: 10488 - protein, 104 aa, Zea mays
  misc_feature: Ceres CLONE ID no. 1638799
  misc_feature: Ceres CDNA ID no. 40041518
MAAPGPYLSSALPSTPARPSLLFSLLGRSTARRCPWPPSSFLLTPISLPCAREVDSDPGPSSDLAPVHRPRALLSVDAIIASDSILLRCVGRACRGQATNLPQA

SEQ ID NO: 10489 - DNA, 1042 bp, Zea mays
  misc_feature: Ceres CLONE ID no. 1638837
  misc_feature: Ceres CDNA ID no. 40041519
  CDS (247)..(591): REFERENCED BY SEQ ID NO: 10490
aacacacacactgaccgacacagcagctccgctcgtcgatcagctctcggctgaccactcatcgccagtgggtgcctgccgaccaggtctcgccgccgccaccgccgcggtagagaggggagggagagggggaaaaaactggcccagatcgagaggtacagcacgaaaaagagaggcaagagagataggggaccggagggcggcgggccggggcccaagaccgaggggctcgtgcgcaggaagctgatgaggctcctgtcgctcgtccccttcggctgccgtgctggacccatcgacgacgcgccgccgcccgtggaccacgccgccgccgcgaggaggcgccggaggaggagggccaacagggccgcccagctgctgggggctgctgcgggtgcgccgcagcagtggcgcccctcgctcggcgacatctgcgaggagtacagcagcagcaccgacgccgtcaaggtcaggaaggcggcgtcctgggacctcgcccgggcgctgccccgcgcgcacggcggcaagcagtaccggcaccttgagggcgcgtcgtccctgccagcgttcgcgccgacggcgttcctgttctgatcatggcgtcggcgacggcggcgactcgtcgtcatccaccacgacgacgacggcggtgaagacaataagaaccaaccaaaaccactacacgaagcatatatacagattactgtcaacgtattgtagaaccaaggatctatgtatatatatgtgcctccatcatcatcggaccggaataaagctagcaatctctcttcttcacgatcgagagatagcgcgcgtgcgtgtaattaagtattatagattactacatactatatatatgtgcatgcatgatgcatgcgtatgtgtatctatatatcatgtgatggtttgtatatgagctagctatagctagagtcgtgtgtaatagcatactacaaactaagctaatacaatatccaagtttgctatattcaaaaaaaaaaaaaaaaaaaaaaaaaaaaaaaaaaaataaaaaaaaaaaaaaaaa

SEQ ID NO: 10490 - protein, 114 aa, Zea mays
  misc_feature: Ceres CLONE ID no. 1638837
  misc_feature: Ceres CDNA ID no. 40041519
MRLLSLVPFGCRAGPIDDAPPPVDHAAAARRRRRRRANRAAQLLGAAAGAPQQWRPSLGDICEEYSSSTDAVKVRKAASWDLARALPRAHGGKQYRHLEGASSLPAFAPTAFLF

SEQ ID NO: 10491 - DNA, 1035 bp, Zea mays
  misc_feature: Ceres CLONE ID no. 1639383
  misc_feature: Ceres CDNA ID no. 40041520
  CDS (335)..(847): REFERENCED BY SEQ ID NO: 10492
agcacacgctcgcgattcaacaaagacgtacgtacatgcacaaaactagagcgagctgtgtgtgtgtgtgttcgtcatttcctcgatcatggcgaaggcgcaggcgcaggtggcggcgaggttcatgatggaggcgccgccgccgcaggtggtgtcggtcatgcggcggaggaaggcgccgaggagcctgagcaccatcgccgaggacgacagggagatgctggcgccgtgcgggtcaccgtcggaccacggccacgtacatacacataactagagcgagtagagataccgtctcttactgtgtgtgtgtgtgtgtgtgtttatcaactcctcgatgcatggcgaaggcgcaggcgcaggtggcggcgaggttcacgacggaggtggcgccgccgcaggtggtgtcggtcatgcgacgaaggaaggggccgaggagcctggacaccatcgccgaggacgacagggagcagcagctggcgtgcgggtcgccatcggaccacggcctcgcgacggcgtggtcgtcgctccagaggataccgacgccaccgcagccgccgcgggagcgcgcaggtgggtccgtgacgagggacctcagcaagaacttcttggactcccacggctgccagcaggccagcggctgggagggtggacacatgctaggccaccggcgagccgtgcatgcgctggagcttcacaaggtcggagcttgttgaagagggaagagagaaaatctagcttagctgcagtgagcttgttcgggagaaatatatttgtaccacttccacacgtgcgctcatgcatgatacttcctccgtttttttatttaccacattttagtaaaaaatgaactagcggctgataaatattcaaaaacggagataatattattttggcttagctttatcacgcgtgatgtggagagtatatatgtttgctgtgaagttgtttttcatccagcttcaatttcgcttgaaataactgtaatagttaatcaaaataaacatacgatattctctctaaaaaaaaaaaaaaaaa

SEQ ID NO: 10492 - protein, 124 aa, Zea mays
  misc_feature: Ceres CLONE ID no. 1639383
  misc_feature: Ceres CDNA ID no. 40041520
MAKAQAQVAARFTTEVAPPQVVSVMRRRKGPRSLDTIAEDDREQQLACGSPSDHGLATAWSSLQRIPTPPQPPRERAGGSVTRDLSKNFLDSHGCQQASGWEGGHMLGHRRAVHALELHKVGAC

SEQ ID NO: 10493 - DNA, 863 bp, Zea mays
  misc_feature: Ceres CLONE ID no. 1639430
  misc_feature: Ceres CDNA ID no. 36707449
  CDS (251)..(616): REFERENCED BY SEQ ID NO: 10494
acgcctgttcattcatcatcgccctgctggtgattttccattcatcatcgatcttcctgcgtctctgaactttttctgctgtgtctgttggccgggagcagaggttgctacacgtatatattctgaagaagagatcgagatgaccagcgtgtggaagaccaaggttctgcctggcctcaacttgtatatgacgtgacagaccaagaaagcttcaataatgtgaagcaatggttgaacgagatagaccgttatgcaagtgataatgttaacaagctccttgttgggaacaagagtgaccttactgccaacaaagttgtggcaactgagacagcaaaggcgtttgctgatgagatgggcatcccattcatggagacgagtgccaaaaacgccatcaacgtggagcaggccttcatggctatggctgcatccatcaaggataggatggccagccaaccagccgcggccaacgctaggccagcgaccgtgcagatccgcgggcaacccgtcaaccagaagacgtcttgctgctcgtcctaagattgcctcatttctttggttccttgtgactatttctacggtttgtgcgcgcacgcaaatgtatttgcattattcctgatagcatctattcgttggccagatgattagagagctgaaaatatgttaagaacaataccatagagagaagttcctcagtgctctcgcagcttaaggagcaaacagcaacactttacttcgttttttatactttattatagccgcactgtttattactcgggctacatttgtgaacagcgactgtaatatttttttactctatattcgtagtgagatgaaatcctgtgtggacaaaaaaaaaaaaaaaa

SEQ ID NO: 10494 - protein, 61 aa, Zea mays; identical to SEQ ID NO: 7850
  misc_feature: Ceres CLONE ID no. 1639430
  misc_feature: Ceres CDNA ID no. 36707449
  misc_feature (1)..(29): Pfam Name: Ras PFAM Desc: Ras family
  misc_feature: Homolog of GI Number: 287835 NR Desc: yptm2
  misc_feature: Homolog of GI Number: 50911379 NR Desc: putative GTP
  misc_feature: Homolog of GI Number: 51468996 NR Desc: RAB1
  misc_feature: Homolog of GI Number: 1053063 NR Desc: small GTP
  misc_feature: Homolog of GI Number: 34906164 NR Desc: putative GTP
  misc_feature: Homolog of GI Number: 51468998 NR Desc: RAB1
  misc_feature: Homolog of GI Number: 1616614 NR Desc: small GTP
  misc_feature: Homolog of GI Number: 303750 NR Desc: GTP
  misc_feature: Homolog of GI Number: 4586580 NR Desc: rab
  misc_feature: Homolog of GI Number: 1370166 NR Desc: RAB1C

SEQ ID NO: 10495 - DNA, 892 bp, Zea mays
  misc_feature: Ceres CLONE ID no. 1639501
  misc_feature: Ceres CDNA ID no. 40041521
  CDS (123)..(683): REFERENCED BY SEQ ID NO: 10496
aagcagcagaagcaaaagccgcaggccgcaactactccgatctgagtatcacagtcacagctaatagctagccagcagcccagcacccagcaactacccgtacgtacgaacgtgcgcttccgatggcgaccacggtgatggcctccgcgaccgcgagctcccccgccttctccgcccccggcgcgcgcgccaggcgcgccgcccggcttccggcggggttccgcggccgtgtcgccgcgccgccgcgccgcctcgcgctgctcgccagggcctcccagcaggccgatgacgctgccgccgacacgagcgcgagcgcggcgccggctgctcggaagctggggctctgggacgcgctggcgttcagcgggcccgcgccggagcggatcaacgggcggctggcgatggtgggcttcgtgtccgcgctcgccgtcgaggccacccgcggcgacggcatcctctcgcaggccggcaacggcgccggcctcgcgtggttcgcgtacaccgccgctgtcctgtccgccgcgtccctggtgccgctgctccagggggagagcgccgagggcaggagcggccggttcatgaccgccgacgccgagctctggaacggccgcctcgccatgctcggcctcgtcgcgctcgccgtcaccgagtaccttaccggcgcgcccttcgtcaacgtgtaaaatacatacaagccgcaacgtacagctgtgatagactggtagtacgtttaatttgtaaaaggataatgtagtatatggtaattggtaatacgcgtacgtatacgtatgcatgcatgcgtaattacaatagcttggaaatttactgtcttctatagggttccctgaaaaaaaacgtaataataattttttggcaaaaaaaaaaaaaaaaa

SEQ ID NO: 10496 - protein, 186 aa, Zea mays
  misc_feature: Ceres CLONE ID no. 1639501
  misc_feature: Ceres CDNA ID no. 40041521
  misc_feature (61)..(177): Pfam Name: Chloroa_b PFAM Desc: Chlorophyll A
  misc_feature: Homolog of GI Number: 14029814 NR Desc: early light
  misc_feature: Homolog of GI Number: 50934633 NR Desc: putative low molecular mass early light
  misc_feature: Homolog of GI Number: 50934635 NR Desc: putative low molecular mass early light
  misc_feature: Homolog of GI Number: 34904610 NR Desc: putative early light
  misc_feature: Homolog of GI Number: 4521272 NR Desc: early light
  misc_feature: Homolog of GI Number: 28194659 NR Desc: putative early light induced protein
  misc_feature: Homolog of GI Number: 1778823 NR Desc: early light
  misc_feature: Homolog of GI Number: 38123375 NR Desc: ELIP
  misc_feature: Homolog of GI Number: 21618071 NR Desc: light
  misc_feature: Homolog of GI Number: 4741964 NR Desc: early light
MATTVMASATASSPAFSAPGARARRAARLPAGFRGRVAAPPRRLALLARASQQADDAAADTSASAAPAARKLGLWDALAFSGPAPERINGRLAMVGFVSALAVEATRGDGILSQAGNGAGLAWFAYTAAVLSAASLVPLLQGESAEGRSGRFMTADAELWNGRLAMLGLVALAVTEYLTGAPFVNV

SEQ ID NO: 10497 - DNA, 928 bp, Zea mays
  misc_feature: Ceres CLONE ID no. 1639607
  misc_feature: Ceres CDNA ID no. 40041522
  CDS (109)..(678): REFERENCED BY SEQ ID NO: 10498
aaccaaaaccacagcatcatcatcgtcctcttctctgcacccgcttccctgttggttgtacctctgctacctagcttgtctccacccacacccgcaccgcgcacatcaatgggggagcacaacaacgatggggtgagcagcacatcgaccatgaggacggcacaccctcggacgccgacgatgctgccgccgacgcgtcccaagataaagatcatccacatcatcgcgccggagatcatcaagaccgacgtcgcccacttccgggacctcgtgcagcggctcaccggcaaggctgcctgctgcgccgccaccgacgtcgtcacatcgacgccgccggtaggggatgacgaggagacggagacgtccaagaagaggccgaggccggcactggctccggtggccaacgacgagaagagcggttttacggtgcaagtgcaagaagagacggcgaccaagaagaggaagatcaagtgcgaggtgaaggtggaggaaggaggcttcggcggttatgagctcggccgtagcgacctgtggatggacctcagcacgggaggagggttcttgagcttcctggaggaggacgaaggcgtcttccaaggcctggctgctgacattgacttcttgcagccttttggctcgtccaggatggacttggttggtgaaatgtacgcgtcttgagtcttgacaacaattcctaggtctagagcttgagagattttttttttgtgcgccgtgagttggtcgagagacttggacagattggtcatccgggtgcttatatttcagacagtgaagcgaatgtaagcacccagatgaccaatctaagggggaagaaaccaggagtgcaatgccaatagtgaattatatgtgtgtaagggccactggtgaaatcatatatagtaagattgatcaaaaaaaaaaaaaaaaa

SEQ ID NO: 10498 - protein, 189 aa, Zea mays
  misc_feature: Ceres CLONE ID no. 1639607
  misc_feature: Ceres CDNA ID no. 40041522
  misc_feature (37)..(61): Pfam Name: VQ PFAM Desc: VQ motif
  misc_feature: Homolog of GI Number: 50929451 NR Desc: OSJNBa0087O24.11
MGEHNNDGVSSTSTMRTAHPRTPTMLPPTRPKIKIIHIIAPEIIKTDVAHFRDLVQRLTGKAACCAATDVVTSTPPVGDDEETETSKKRPRPALAPVANDEKSGFTVQVQEETATKKRKIKCEVKVEEGGFGGYELGRSDLWMDLSTGGGFLSFLEEDEGVFQGLAADIDFLQPFGSSRMDLVGEMYAS

SEQ ID NO: 10499 - DNA, 1578 bp, Zea mays
  misc_feature: Ceres CLONE ID no. 1639792
  misc_feature: Ceres CDNA ID no. 40352066
  CDS (113)..(1261): REFERENCED BY SEQ ID NO: 10500
gtaaccctaaaccctggcagtcgtcgtgcttgcatgttaccaccttagttcaagcaatgtgctttcattcagctttccacagcgaaaggccgcattatatacgctgtcgaagatggaccggaaggtaaagtcgtcacggacgcgggcgctgctgaaccggcacctggcctcgctgggcgtccccaagagcgcgcactgcctcgcgctgcggctggccgaagagttcgcggtgaacgcggcggcgcgctcgcccgtgccgccgccggagcacgcgccgcgcctcaccgacgcctcgcgcctccacgtggcgctcgtgaccgacaacgtgctcgcggcggccgtcgcggtggcgtccgccgcgcggagcgccgccgacccggccaggctggtgctccacgtgctcacggacaggaagagctacgtgcccatgcactcgtggttcgcgctgcaccccgtgccgcccgcggtcgtcgaggtcaggggcctgcaccagctcggctggcgcgacgccggcgccgtcgcctccgtcatgcggacggtccaggaggtccggaggagctcgctggattggtatcgacgacagtgcggtggtgggtcgtcggcggaggagaccaggcccagcgcgttctcgctcctcaactacctcaagatccatctcccggagctcttccctgagcttggcagggtggtgcttctggacgacgacgtcgtggtgcgcgaggacttggcagggctgtgggagcaggacctcgacgggaacgtcatcggcgcggtcggcgctcacgacggcggcggcggcggcgtctgcgtcgacaagaccctcggcgaccacctgaatttctccgaccctgacgtgtccggctccggcccactacacagctcgcgatgcgcgtggtcgtggggcgtcaacgtcgtcgacctcgacgcgtggcgacggacgaacgtcaccgagacgtaccagttctggctacagaagaaccgggagtcgggcttcaggctgtggcagatggcctcgctgccgccggccctgctcgcgttcgacgggcgcgtccaggcgatcgacccgcggtggaacctgccgggcctgggctggcgcgtgccgcaccccgacctcgtgcggctctccgccgtcctgcacttcagcgggccacggaagccgtggctggaggtcgcgttcccggagctgcggcagctgtggctcgcccacttgaacgcgtcggacagtttcttacagggatgcggtgtggtcgaatggcagtagatggggtacggacgggaacagcagagcatcagagttgggaggagacgtacagtgatttggtccaggtccaggtccaggtcttcaggatcacggattttaactggggccgccgggagagggaagtaggtgttgcctgcagtctctcctggccttcgggttctacacgcagtccacatccacattaatctgtacaactgctcgtggtttttcttaagccaatataacattaccacgtccaacgttcacaaaaaaaaaaaaaaaaaaaaaaaaaaaaaaaaaaaaaaaaaaaaaaaaaaaaataaaaaaaaaaaaaaaaa

SEQ ID NO: 10500 - protein, 382 aa, Zea mays
  misc_feature: Ceres CLONE ID no. 1639792
  misc_feature: Ceres CDNA ID no. 40352066
  misc_feature (29)..(354): Pfam Name: Glyco_transf_8 PFAM Desc: Glycosyl transferase family 8
MDRKVKSSRTRALLNRHLASLGVPKSAHCLALRLAEEFAVNAAARSPVPPPEHAPRLTDASRLHVALVTDNVLAAAVAVASAARSAADPARLVLHVLTDRKSYVPMHSWFALHPVPPAVVEVRGLHQLGWRDAGAVASVMRTVQEVRRSSLDWYRRQCGGGSSAEETRPSAFSLLNYLKIHLPELFPELGRVVLLDDDVVVREDLAGLWEQDLDGNVIGAVGAHDGGGGGVCVDKTLGDHLNFSDPDVSGSGPLHSSRCAWSWGVNVVDLDAWRRTNVTETYQFWLQKNRESGFRLWQMASLPPALLAFDGRVQAIDPRWNLPGLGWRVPHPDLVRLSAVLHFSGPRKPWLEVAFPELRQLWLAHLNASDSFLQGCGVVEWQ

SEQ ID NO: 10501 - DNA, 898 bp, Zea mays
  misc_feature: Ceres CLONE ID no. 1639802
  misc_feature: Ceres CDNA ID no. 40352067
  CDS (66)..(731): REFERENCED BY SEQ ID NO: 10502
acccttcgccgcgacgctccctatccatagcgcccgctcatcagcccacgcggccacgccgaagtatggcgctctccgtctcctccctcgccgccgccctctcccacctctccctcccatcgacctccacccccaagcctcaccaggccccgctcctgcgcctgcgctccacctaccgccgcgctgttagcctcgcgctccgcgcctccgcagccgaagcgtttgaggcggacctgcccgcggaggaggtgatggctgtcgaggaggaggcggaggaggatgcgctgtcgggaatcgcgctgcgaaagtatgtgaagcaacggctgccgggcgggttcgcggcgcagcggatcaccgccacgggccgtcgcaagacggccatcgcccgcgtcgtgctccaggagggcaccggcaaggtcttcatcaacttccgcgacgctaaggagtatctgcagggaaatccaatgtggatggagtactgcaaggtacccttgatgactctagggtttgagaagaactatgacgtctttgtgaaagtacacgggggtggtctctcaggccaggcccaggccatttgccttggtgttgcccgtgcgctggtgaagatcagcaatgccaacagggttcctctgaagtcggaaggtttgctgacaagggacacccgtatcgttgaaaggaagaaggctggtctcaagaaggcacgcaagcggccccagttctcaaagcgttgaggatgttcacttgttgcattgccacttccagaggccttttttttctgtcaactgctgtgcaaaatctgtaatggacgcgatatatctgtagtattctttttcctgaaccaaatttcatgaggtggctatctgattctgctggttaagtgtaaaaaaaaaaaaaaaaa

SEQ ID NO: 10502 - protein, 221 aa, Zea mays
  misc_feature: Ceres CLONE ID no. 1639802
  misc_feature: Ceres CDNA ID no. 40352067
  misc_feature (100)..(221): Pfam Name: Ribosomal_S9 PFAM Desc: Ribosomal protein S9/S16
MALSVSSLAAALSHLSLPSTSTPKPHQAPLLRLRSTYRRAVSLALRASAAEAFEADLPAEEVMAVEEEAEEDALSGIALRKYVKQRLPGGFAAQRITATGRRKTAIARVVLQEGTGKVFINFRDAKEYLQGNPMWMEYCKVPLMTLGFEKNYDVFVKVHGGGLSGQAQAICLGVARALVKISNANRVPLKSEGLLTRDTRIVERKKAGLKKARKRPQFSKR

SEQ ID NO: 10503 - DNA, 1000 bp, Zea mays
  misc_feature: Ceres CLONE ID no. 1640003
  misc_feature: Ceres CDNA ID no. 40352068
  CDS (496)..(801): REFERENCED BY SEQ ID NO: 10504
aactggtgaaattgaatcctgaacccatctctactgtttgtcctcctgtagctctcctctgatcccccactccctcctatttcagtatcttccaagtccgtcccagtagttagttgcattggcaaaactttaacaagtcatagtaaattagtaacgttttttatttattgtgaaattttttacaagtctactttgaatttttatgctgtcaggtagtaaaagtggagcattgtgaaagagtgcatatcattgcagctgcaaaacggatttgtattgccaactgccgggaatgcatcttctacataggagtaaatcaccaacctcttgtgttgggggacaaccataaattacaaattcctagttggtttggggatgaaaggcaagggactacaaaccgcaatcctttcccactgcctgaaatttatgggacatcccaaagcaaaaagcgttctgctctggaagatatccaaaagatgattcgggagctgcagcttgatgagaaccggaaaagggaattggcaactgcccttcacgttcagttcaaggattggttatacgcttcaggcaatatccgccagctctactgtctacagggcgattaacgatgggatttgcaagactgactacccttttgccgactcctactccaaaacattcgacaattgtcgaaagctgaccttcctttccctgggagagaggattcccacccgcgcagaaggatgtgaagatgtactgttacctacttttttacagattcatttgggtatattccctttgctgcgagttggaggtactaattaagatgtaatctccaagcctactcattttttttggcccttgataacgtccacgagtatgtaatagggactggtgaatcatacgttgtaaacatttcttcatcccgttttgctaaatggctcgtcatgtcaaccctctattggatcaactgtattgtgctcatccttatagacatgcttgtttgcaaaaaaaaaaaaaaaaa

SEQ ID NO: 10504 - protein, 42 aa, Zea mays
  misc_feature: Ceres CLONE ID no. 1640003
  misc_feature: Ceres CDNA ID no. 40352068
MIRELQLDENRKRELATALHVQFKDWLYASGNIRQLYCLQGD

SEQ ID NO: 10505 - DNA, 1029 bp, Zea mays
  misc_feature: Ceres CLONE ID no. 1640073
  misc_feature: Ceres CDNA ID no. 36707559
  CDS (405)..(848): REFERENCED BY SEQ ID NO: 10506
agaatcttgacggaacgattccaccaagaaccgcgggcaacaattcacaccgcgcttctcttctccagcgatgcagacgacggcggcggcggctgtggcatgggcgcctggcccatcggcgtccacctcgtcatcgtcctcgccgtccaccttcagggtaagggttccgttaccccctgtggcttttctcgaggggccttttctcgcctggctcggtccggctgattggttctcgattcggtgcacaggtgggggttgcgtcgacggccgtgcgggcttgttccgcgcccaggcttgttgcgtcctccgcgcccctgggctgtcgacggctgcgacaagtggttcaagctgttgccaatccagaccctgcgatcgagcttccattgactgctgaaaatgttgagatggtgttggatgaagtaaggccgtatcttatggcagacggaggcaatgttgcgttgcatgagattgatgggaacgtggtaaggttaaagctgcaaggagcatgtggttcatgcccggcttcagtaacaacgatgaagatgggtattgaacggcgcttgatggagaaaataccagagattgttgcagttgagcccattgctgatgaggaaactggccttgagttgaaccaagagaacattgaaaaggtacttgacgagattaggccataccttgctggcacaggaggtggcgagctcgagtttgtcacaatcgaggagcctattgtcaaggttaggcttacaggcccagctgctggtgtgatgactgtccgagtagcattgactcagaagctccgtgaaaaaatccctaaaattgcagctgtccagcttttgccattagattagaatcttttagaagccaggcaccagtcacagttgataatgtaaatgcactaccgcaataaatttaaggagttgtaatgtgtagcctgctgagcatttagctcctcttcagcgatattatgatcatcgatacacaatgttcaagtaaaggtgttggttggatttgtaaaaaaaaaaaaaaaaa

SEQ ID NO: 10506 - protein, 147 aa, Zea mays
  misc_feature: Ceres CLONE ID no. 1640073
  misc_feature: Ceres CDNA ID no. 36707559
  misc_feature (2)..(66): Pfam Name: NifU PFAM Desc: NifU
  misc_feature: Homolog of GI Number: 62734078 NR Desc: Similar to seven transmembrane protein Mlo4
  misc_feature: Homolog of GI Number: 77553808 NR Desc: NifU
  misc_feature: Homolog of GI Number: 30698492 NR Desc: NifU1
  misc_feature: Homolog of GI Number: 53792847 NR Desc: putative Nuclear
  misc_feature: Homolog of GI Number: 28207820 NR Desc: NFU3 protein
  misc_feature: Homolog of GI Number: 21554503 NR Desc: nitrogen fixation like protein
  misc_feature: Homolog of GI Number: 78100772 NR Desc: Chain A
  misc_feature: Homolog of GI Number: 23126802 NR Desc: COG0694: Thioredoxin
  misc_feature: Homolog of GI Number: 22298836 NR Desc: NifU protein homolog
  misc_feature: Homolog of GI Number: 20908090 NR Desc: AT4g01940/T7B11_20
MVLDEVRPYLMADGGNVALHEIDGNVVRLKLQGACGSCPASVTTMKMGIERRLMEKIPEIVAVEPIADEETGLELNQENIEKVLDEIRPYLAGTGGGELEFVTIEEPIVKVRLTGPAAGVMTVRVALTQKLREKIPKIAAVQLLPLD

SEQ ID NO: 10507 - DNA, 962 bp, Zea mays
  misc_feature: Ceres CLONE ID no. 1640173
  misc_feature: Ceres CDNA ID no. 35383497
  CDS (212)..(634): REFERENCED BY SEQ ID NO: 10508
aaccccgcccacctcttccgtcctcccgttcccgtcccgcacacagactctttctctctcctcccctctctcgtcctttctctctcgtccgatctgcatctgcttttctccccccttgtctgtctccctcctgtccgtggcgtgcgcaaagatttgatttttttttctcggggaggagccggagtccgaggagatacggcgggtgccggagatgggcggcgcgtcggcgtcggcctcgtcgggcgccggcgcggatgagcgtcccaagggggaggacggcaagcaggggcaggtggcggcgggggcgcagcctccggcgggcgggaagaagcgcgggcgcaccgcgggggacaaggagcagaaccggctgaagcggctgctgcggaaccgcgtgtccgcgcagcaggcgcgggagcggaagaaggcgtacctgacggagctggaggcgaaggccaagggcctggagctccgcaatgcggagctggagcagcgggtgtccacgctccagaacgagaacaacacgctccgccagattctgaagaacacgacggcgcacgcgagcaagaggtccggcggcggcgccggcggcaagggcggagacggcggcaagaagcaccacctcgccaagagctagtgagaaatgagagagggagctggttcgtgccctgctcgcgctcgcctgatctgaccattgctggcgtgttgctgttcctgacgacgccttctctttttcttcttttctcctactgttacccgtgggtttcgtctcttgcctcgctgatgcactgttttaactgttagccatcccgtctactcaccagtgaacactgctgctagttaatttctcggtggtttagggtgccgtgccagaacgccgtgtaacttcgttcttgtactgtcttgtagttcagccttgcggtttggcaattcgattcaagattactgaaaaaaaaaaaaaaaaa

SEQ ID NO: 10508 - protein, 140 aa, Zea mays
  misc_feature: Ceres CLONE ID no. 1640173
  misc_feature: Ceres CDNA ID no. 35383497
  misc_feature (47)..(101): Pfam Name: bZIP_2 PFAM Desc: Basic region leucine zipper
  misc_feature: Homolog of GI Number: 55770607 NR Desc: putative TGACG
  misc_feature: Homolog of GI Number: 34910258 NR Desc: putative THY5 protein
  misc_feature: Homolog of GI Number: 6018699 NR Desc: THY5 protein
  misc_feature: Homolog of GI Number: 23496521 NR Desc: bZIP with a Ring
  misc_feature: Homolog of GI Number: 2934885 NR Desc: TGACG
  misc_feature: Homolog of GI Number: 2934884 NR Desc: TGACG
  misc_feature: Homolog of GI Number: 2251085 NR Desc: HY5
  misc_feature: Homolog of GI Number: 50906095 NR Desc: putative bZIP protein HY5
  misc_feature: Homolog of GI Number: 2104677 NR Desc: transcription factor
  misc_feature: Homolog of GI Number: 50725042 NR Desc: putative bZIP protein HY5
MGGASASASSGAGADERPKGEDGKQGQVAAGAQPPAGGKKRGRTAGDKEQNRLKRLLRNRVSAQQARERKKAYLTELEAKAKGLELRNAELEQRVSTLQNENNTLRQILKNTTAHASKRSGGGAGGKGGDGGKKHHLAKS

SEQ ID NO: 10509 - DNA, 1087 bp, Zea mays
  misc_feature: Ceres CLONE ID no. 1640309
  misc_feature: Ceres CDNA ID no. 40041523
  CDS (355)..(786): REFERENCED BY SEQ ID NO: 10510
agaaaggggagggaggggcagataaagaacactgcaccatttgtgtgctcacttgctttcaaacgtgcacctcccctcttcttcctcctcccctcatctccttccaacaacgccataaccacagcttccctctcctcctctctcttgttgcacgaatatgacgccataaccacagcttccccgtgaacgacaaggagaagcagagagtgctacataggtacatgtagggtactataggataagaactgtacagctaggaggtagcggagggaggagcacgccgcctctgcagaagcacagcagcaacggctcttcttcctccgctcttccgaacccgtcgctgtacagacaccaatggcggcctcggaccagtacccctgcccagcccctgccgccgaggacgggggccctgcccctgcagccgccggccggcccaaggatcctgcccccgctgcatctgctacaacagccggcgtgcggctccagggacgccgcggcggcagagctggtgcggatgctggagcgcgccatggtgcgcgaccgggaggcaacgccgccttcaccgtgctactacgcggcgcctgccgcctcggcgtaccgccacggcagcgcgccgaggaccttcgccgcgggcgggttccacgccccggctgtgagcgtgcggtcggtgatcccggtgtgcgccgccccgccgccgccgcagaccccggtcaaggaggaaaggaatggcccggcgacaccctcaggcgcatgcaagagggcgtgagcgacgtggtcagcttgtgaagcgcagcaagagaagaagaaagaaagagcctggctctgttgttgcaggggagttttggatcacaactttctctgtagtctgtacagaagttgtgtacgaggtcaactactacgcatctccctcgctctctgtgtgtgtttgaccaggatctagatggtgagatcttcgtcagaaaggcagccatggccatgatgaggctgtgaagggttttaggtggacgatgaacatatatgaatatagttgtactgttctagggcttcagtagaagccatgctaccgtgttaaaaaaaaaaaaaaaaa

SEQ ID NO: 10510 - protein, 143 aa, Zea mays
  misc_feature: Ceres CLONE ID no. 1640309
  misc_feature: Ceres CDNA ID no. 40041523
MAASDQYPCPAPAAEDGGPAPAAAGRPKDPAPAASATTAGVRLQGRRGGRAGADAGARHGARPGGNAAFTVLLRGACRLGVPPRQRAEDLRRGRVPRPGCERAVGDPGVRRPAAAADPGQGGKEWPGDTLRRMQEGVSDVVSL

SEQ ID NO: 10511 - DNA, 633 bp, Glycine max
  misc_feature: Ceres CLONE ID no. 1641183
  misc_feature: Ceres CDNA ID no. 36707675
  CDS (2)..(376): REFERENCED BY SEQ ID NO: 10512
gcatcggagttcaagcgcgagcacgaaagcacacgcagtcgctaacacttgctctctactgatatcgatcgatggccatggtagcgagagccgcgctgctcctggccatggtggtcgtggcaagcgccacctactgccccccgccgccggcgccggtgccggtgccccgctacgggtcgtgcccccagaacgcgctcaagctgcacgtctgtgccaacgtgctgaacctggtgaaggccaagatcggcgtgccgccagcggagccctgctgctcgctcctcgacgggcttgtcaacctggacgccgccgtctgcctttgcaccgccatcaaggccaacgtgctgggaatccacctcaacgtccccatcgaccttagcctcatcctgaacaactgcggcaagatctgcccggccgacttccagtgcatccactaggaaagctagaagtgcacagtactatccatcgagtggggtgtgtggtttgctttggtttcaagctttttgctttatttatttcttaaatctatgctggcaatctggcctagtatgtatgttctcgctttcacacgagaggtagcattatgatcctttggaatttaattgaagtagtgatttcacaaaaaaaaaaaaaaaa

SEQ ID NO: 10512 - protein, 120 aa, Glycine max
  misc_feature: Ceres CLONE ID no. 1641183
  misc_feature: Ceres CDNA ID no. 36707675
  misc_feature (37)..(118): Pfam Name: Tryp_alpha_amyl PFAM Desc: Protease inhibitor/seed storage/LTP family
  misc_feature: Homolog of GI Number: 37536722 NR Desc: putative lipid transfer protein
  misc_feature: Homolog of GI Number: 37536718 NR Desc: putative lipid transfer protein
  misc_feature: Homolog of GI Number: 37536720 NR Desc: putative lipid transfer protein
  misc_feature: Homolog of GI Number: 50927843 NR Desc: OSJNBa0010H02.23
  misc_feature: Homolog of GI Number: 39748094 NR Desc: lipid transfer protein
  misc_feature: Homolog of GI Number: 50911525 NR Desc: root
  misc_feature: Homolog of GI Number: 39748092 NR Desc: lipid transfer protein
  misc_feature: Homolog of GI Number: 2226329 NR Desc: physical impedance induced protein
  misc_feature: Homolog of GI Number: 31431415 NR Desc: putative lipid tranfer protein
MAMVARAALLLAMVVVASATYCPPPPAPVPVPRYGSCPQNALKLHVCANVLNLVKAKIGVPPAEPCCSLLDGLVNLDAAVCLCTAIKANVLGIHLNVPIDLSLILNNCGKICPADFQCIH

SEQ ID NO: 10513 - DNA, 1661 bp, Glycine max
  misc_feature: Ceres CLONE ID no. 1641340
  misc_feature: Ceres CDNA ID no. 35383498
  CDS (113)..(1402): REFERENCED BY SEQ ID NO: 10514
actggctccgatcagagttggttggtggaaagaaagaagaaggaaggaaggaagcaaaaaccaaaaggtggttcttttgagggtttaggtactaataaattggttgaatgaaatgtcgcaggtgaatgagcaccaccacgcaccctcaacgccagggaagttgaagccagaaaaatccccatacaaccaccgcctccgaatccgctcctcactctccaagctcacactctggtcctccttcttcctcgcattcatcctcttcctcttcattctgtctccgccgtcgccctccgcctctccccgccgctccctcggcgactcctggggcggtccccactgggagaagcgcgtggccaagtccgcccgccgctcctccccctccagcctctccgtcctcgtcaccggcgccgccggcttcgttggctcccacgtctccctctccctcaagcgccgcggcgacggcgtcctcggcctcgacaacttcaaccgctactacgaccccgccctcaagcgcgcccgccaacgcctcctcgaccgcgccggcgtcttcgtcgtcgacgccgacctcaacgatgccgccctcctccgcaagctcttcgacgtcgtccccttcacccacgtcatgcacctcgccgcccaggccggcgtccgctacgccatgcaaaaccctcaatcctacatccacagcaacatcgccgccttcatcaaccttctagaagcttccaaatgcgctaaccctcaaccctccatcgtctgggcctcttccagctccgtctacggcctcaattccaaagtccccttctccgaaaaggaccgtacggatcaacccgcgagcctctacgccgccacaaagaaagcaggggaagaaatcgctcacagctataaccacatctacgggctctccattaccgggcttcgcttcttcactgtttacgggccctggggcaggcccgacatggcgtacttcttcttcacgaaggacattctcaaggggaagcagattgcgatattcgaatctcccgatgggggaaccgtggcgagggatttcacctacattgacgacattgtgaaggggtgtttgggggctttggataccgcgaagaagagtactgggagtggggggaagaagaaagggcctgcgcaatttagggtttttaatttggggaatacttcccctgtgcctgtgactgagcttgtggcgattctggagaagcttcttaaggtgaaggccaagaagaaggtgcttccaatgcctacaaatggagatgtgaagttcactcatgctaatattagtttggctcacagggaccttgggtacaggcccaccactgatttggagactgggctcaggaagtttgtgaagtggtaccttgaattttactccaagaagacctcttggtgaatgttgatgtcattcttttgctttactgcccctattcttttcgctctgctttgtaatttggaggatggaggttttaccgttgtattaggggttacggatgacctagcatcatgttctgttgtcttctttttcttgtattttttttttttcatcttcaattgtatgcctgccttttaggttagccgctgtaaattttttagttgagttgagacattgaattgatattttagttatttgtgctaaaaaaaaaaaaaaaaaa

SEQ ID NO: 10514 - protein, 429 aa, Glycine max
  misc_feature: Ceres CLONE ID no. 1641340
  misc_feature: Ceres CDNA ID no. 35383498
  misc_feature: null
  misc_feature: Useful for making plants with altered cell wall content and/or composition
  misc_feature (96)..(322): Pfam Name: NAD_binding_4 PFAM Desc: Male sterility protein
  misc_feature: Homolog of GI Number: 21536982 NR Desc: nucleotide sugar epimerase
  misc_feature: Homolog of GI Number: 23198200 NR Desc: nucleotide sugar epimerase
  misc_feature: Homolog of GI Number: 22136952 NR Desc: putative NAD dependent epimerase
  misc_feature: Homolog of GI Number: 15293119 NR Desc: putative nucleotide sugar epimerase
  misc_feature: Homolog of GI Number: 28973495 NR Desc: putative nucleotide sugar epimerase
  misc_feature: Homolog of GI Number: 23297355 NR Desc: putative nucleotide sugar epimerase
  misc_feature: Homolog of GI Number: 50915498 NR Desc: putative nucleotide sugar epimerase
  misc_feature: Homolog of GI Number: 75675267 NR Desc: NAD
  misc_feature: Homolog of GI Number: 75819405 NR Desc: COG0451: Nucleoside
MSQVNEHHHAPSTPGKLKPEKSPYNHRLRIRSSLSKLTLWSSFFLAFILFLFILSPPSPSASPRRSLGDSWGGPHWEKRVAKSARRSSPSSLSVLVTGAAGFVGSHVSLSLKRRGDGVLGLDNFNRYYDPALKRARQRLLDRAGVFVVDADLNDAALLRKLFDVVPFTHVMHLAAQAGVRYAMQNPQSYIHSNIAAFINLLEASKCANPQPSIVWASSSSVYGLNSKVPFSEKDRTDQPASLYAATKKAGEEIAHSYNHIYGLSITGLRFFTVYGPWGRPDMAYFFFTKDILKGKQIAIFESPDGGTVARDFTYIDDIVKGCLGALDTAKKSTGSGGKKKGPAQFRVFNLGNTSPVPVTELVAILEKLLKVKAKKKVLPMPTNGDVKFTHANISLAHRDLGYRPTTDLETGLRKFVKWYLEFYSKKTSW

SEQ ID NO: 10515 - DNA, 1542 bp, Glycine max
  misc_feature: Ceres CLONE ID no. 1641429
  misc_feature: Ceres CDNA ID no. 40041524
  CDS (154)..(1296): REFERENCED BY SEQ ID NO: 10516
aaaaccaaaccaaaataaaacctacgagtggtgtctctatgtttgtgagacccaaacgcggtcttacttcttcttcttcttcttcacttgtcctctgttttgaattgctctgctctgcatgaaacagagtcccctgttggattgttcattgcaatgaggtatattcggagcaacagcttcaagaggttcttctcattcagaagacgcagttcaagggaacagattctgagtcccaacagtaagggtgaaggaaacaatgagattcttccgcatgaagaagaaccttctcgaagaccctcttggaagtgcttctcttatgaagagttgtttgatgccaccaatggcttcagctcagaaaatttggtgggaaaaggagggtatgcagaggtttacaagggaacaatgaatggtggtgaggaaattgctgtgaagagactcacaagaacttcgagggatgagagaaaggagaaagagtttttgacagagattggtacaattggtcatgtgaaccattccaacgttttacctcttttggggtgttgtattgataatggtctttaccttgtttttgagctatcttccagaggttctgttgcatctcttattcatgatgaaaaattgcctcctctagattggaaaacgagacataagatagctattggaactgcacgtggccttcactacttgcataaggattgcaagaggaggataatccaccgggacatcaagtcttcaaacattttgttaacaaaggattttgaaccacagatatctgattttggcctagcaaaatggcttccatctcaatggactcatcattcaattggccctatagaagggacatttggacatttggccccagagtactacttgcatggtgttgtggatgagaagacagatgtgtttgcctttggtgtgttcatgctagaagtaatctctggcagaaaaccagtggatgggtctcaccaaagcttacatagctgggctaaaccaattttgaacaagggtgagatagaagagttggtggatccaaggcttgaaggggcttatgatgtgacacagttaaagagatttgccttcgctgcctctctttgcattcgggcatcttcaacttggcgacctaccatgagtgaggtattagagataatggaggaaggagagacggatatagagaagtggaaaatgccagaggaagaagaagaacaagaggaggagttctggggttttgaggatctggaatatgaatatgacagctccttttcaatgtctttacttgactccattggaagtacttaattaggagttacatcattacatgcctttttcaattgcttgtatatatacaaatttcatagagaggagttcatgtggctatgctactcctatctaatcaaatcaaatctctaataacattttttttcacttttttttttatggatgtgaaataattattgtaattgaactccattatgtcggcaacaccagaggaaatgacccagcaaggttgtttcaatttcactgacaaaaaaaaaaaaaaaaaaa

SEQ ID NO: 10516 - protein, 380 aa, Glycine max
  misc_feature: Ceres CLONE ID no. 1641429
  misc_feature: Ceres CDNA ID no. 40041524
  misc_feature (234)..(266): Pfam Name: Pkinase_Tyr PFAM Desc: Protein tyrosine kinase
  misc_feature: Homolog of GI Number: 53792830 NR Desc: putative benzothiadiazole
  misc_feature: Homolog of GI Number: 50929275 NR Desc: OSJNBb0022F16.6
  misc_feature: Homolog of GI Number: 50942927 NR Desc: SERK1 protein
  misc_feature: Homolog of GI Number: 53749128 NR Desc: At5g57670
  misc_feature: Homolog of GI Number: 52075932 NR Desc: putative receptor protein kinase PERK1
  misc_feature: Homolog of GI Number: 52075934 NR Desc: putative receptor protein kinase PERK1
  misc_feature: Homolog of GI Number: 30698132 NR Desc: protein kinase
  misc_feature: Homolog of GI Number: 22136306 NR Desc: putative serine/threonine protein kinase
  misc_feature: Homolog of GI Number: 9758799 NR Desc: serine/threonine protein kinase
  misc_feature: Homolog of GI Number: 15810235 NR Desc: putative Pto kinase interactor
MRYIRSNSFKRFFSFRRRSSREQILSPNSKGEGNNEILPHEEEPSRRPSWKCFSYEELFDATNGFSSENLVGKGGYAEVYKGTMNGGEEIAVKRLTRTSRDERKEKEFLTEIGTIGHVNHSNVLPLLGCCIDNGLYLVFELSSRGSVASLIHDEKLPPLDWKTRHKIAIGTARGLHYLHKDCKRRIIHRDIKSSNILLTKDFEPQISDFGLAKWLPSQWTHHSIGPIEGTFGHLAPEYYLHGVVDEKTDVFAFGVFMLEVISGRKPVDGSHQSLHSWAKPILNKGEIEELVDPRLEGAYDVTQLKRFAFAASLCIRASSTWRPTMSEVLEIMEEGETDIEKWKMPEEEEEQEEEFWGFEDLEYEYDSSFSMSLLDSIGST

SEQ ID NO: 10517 - DNA, 1314 bp, Glycine max
  misc_feature: Ceres CLONE ID no. 1641944
  misc_feature: Ceres CDNA ID no. 35383499
  CDS (176)..(1039): REFERENCED BY SEQ ID NO: 10518
atttcagcccttattcaatgctttaccaaactcactcatcatcctccagtctttcaatttcatcccttcacttctttccacaaccccatcatcttttccctcttttcttctctctcaggcggagaaagaaatggagtgtttggaagcagcgttgaagagcagtttcaggaaagacatggccctcaaacaaacgttgttcctagaggagttctcgtccgcctctaacgttcaaaacgtcgtcgcttcctccgacgacttgttcgttgacgacctcctcaacttttcactcctcgaaaacaacaccaacaacaataacaacaacgaagaacccgaccaacaactcaacaaccacgactccaccacccctcagaacaaccaggaaaattacaattataacccctccttcaacgacaacaatttcaacaccgaactcaccgttccggcggaggaggaagttgcggacttggaatggttgtctcgtttcgtcgaagattctaatttctcggaatattctcttcccttccccgcaaccgtgactgagaaagtgaaagtgaaatcaccggaaccgggaaataccgctttcactttcaaaaccccggttccggccaaggccaggagcaagcgaacgcgaaccggtgtccgggtttggccgctcaagtcaccctctttggccgccgcgtcttcaacaacaacctcgtcctcgtcctcgtcttcgccctcgagtccgcaacgtgcggactcgagggcgaagaagcgtgccgctgcggacggcggcgcggcgcgacggtgcagccactgtggcgttcagaaaacgccgcagtggcgcaccggaccgctcggggctaagactctgtgcaacgcgtgtggggtccgctacaagtcgggtcggttattacccgaatatagacccgcctgtagccctactttctccagcgagttgcactccaaccaccaccgaaaggtcctcgagatgcggcggaagaaggaggacgtgcctgagcccgacaccgcttcgccaccgtcgcttcccggtttttgaattttttttttcaggttagaaaaaaaaaagagtaatagttagagaagaggttggaccaaatggacctgtttcagtggggcccggagttagtgtgtacattttttttccttttaattttaaccgtcgttggttgtggtaggtgttaatgttagttgttagacattacttattactataatgttattattaattaggacttaggagacttaatattgaagaacaattttactttttatgaaaatttgatgaaattataaaaaaaaaaaaaaaaaaaa

SEQ ID NO: 10518 - protein, 302 aa, Glycine max
  misc_feature: Ceres CLONE ID no. 1641944
  misc_feature: Ceres CDNA ID no. 35383499
  misc_feature (220)..(255): Pfam Name: GATA PFAM Desc: GATA zinc finger
  misc_feature: Homolog of GI Number: 24030302 NR Desc: putative GATA
  misc_feature: Homolog of GI Number: 37572449 NR Desc: AG
  misc_feature: Homolog of GI Number: 34098855 NR Desc: At5g66320
  misc_feature: Homolog of GI Number: 21436205 NR Desc: putative transcription factor
  misc_feature: Homolog of GI Number: 50911202 NR Desc: putative AG
  misc_feature: Homolog of GI Number: 50927013 NR Desc: OSJNBa0011L07.7
  misc_feature: Homolog of GI Number: 34909448 NR Desc: OSJNBa0014K08.18
  misc_feature: Homolog of GI Number: 37572445 NR Desc: AG
  misc_feature: Homolog of GI Number: 2959736 NR Desc: homologous to GATA
  misc_feature: Homolog of GI Number: 37536778 NR Desc: putative transcription factor
MECLEAALKSSFRKDMALKQTLFLEEFSSASNVQNVVASSDDLFVDDLLNFSLLENNTNNNNNNEEPDQQLNNHDSTTPQNNQENYNYNPSFNDNNFNTELTVPAEEEVADLEWLSRFVEDSNFSEYSLPFPATVTEKVKVKSPEPGNTAFTFKTPVPAKARSKRTRTGVRVWPLKSPSLAAASSTTTSSSSSSSPSSPQRADSRAKKRAAADGGAARRCSHCGVQKTPQWRTGPLGAKTLCNACGVRYKSGRLLPEYRPACSPTFSSELHSNHHRKVLEMRRKKEDVPEPDTASPPSLPGF

SEQ ID NO: 10519 - DNA, 826 bp, Glycine max
  misc_feature: Ceres CLONE ID no. 1642463
  misc_feature: Ceres CDNA ID no. 29191619
  CDS (284)..(655): REFERENCED BY SEQ ID NO: 10520
acagtttgttattttgttatcttgaagtaatccacccacgggtttcttggagttgtgatcaactacgttacttctctcttggttttcttcatcttccaccttcacctggtttacttccttcgataattaactttatcaaaatcaaactttgatgttcttgcttgtcttaattacttctctgtcgtttgacgaatagtattacactattgtctgggaattttgttcctttcctcttttctgaattccgtttctctgaaaagaagtttatcataaacacgttggaatggcaaggaactacttcaaacaagaacatgatcttgagaagagaagagctgaggctgctaggattagggagaaatacccagacaggattccggtaattgtggagaaggccgaaagaagtgacatcccaagtattgacaagaagaagtaccttgtccctgctgacttgactgtaggacagtttgtctacgtgatccgcaaaaggattaaattaagtgcagaaaaggcaatctttatatttgtggacaatgtccttcctcctacaggagcaattatgtctgccatatatgatgagaagaaggacgaggatggatttctctatgttacatacagtggcgagaacacctttggggatctgatttccattcagtagccattatataaatttacaccgtttgacctctggtctccttgatctgtctgacaaattcgttatagtactcatgtcaagaaccttactctcaatgttttgtaaagttgtatataaattccgtgaacttgattaatattaaaagttccctcattcaaaaaaaaaaaaaaaaaa

SEQ ID NO: 10520 - protein, 123 aa, Glycine max
  misc_feature: Ceres CLONE ID no. 1642463
  misc_feature: Ceres CDNA ID no. 29191619
  misc_feature (14)..(117): Pfam Name: MAP1_LC3 PFAM Desc: Microtubule associated protein 1A/1B
  misc_feature: Homolog of GI Number: 21615419 NR Desc: microtubule associated protein
  misc_feature: Homolog of GI Number: 20147099 NR Desc: AT4g16520/dl4285c
  misc_feature: Homolog of GI Number: 40716445 NR Desc: microtubule
  misc_feature: Homolog of GI Number: 50941899 NR Desc: putative microtubial binding protein
  misc_feature: Homolog of GI Number: 21592920 NR Desc: putative microtubule
  misc_feature: Homolog of GI Number: 18389282 NR Desc: putative microtubule
  misc_feature: Homolog of GI Number: 30689948 NR Desc: autophagy 8e
  misc_feature: Homolog of GI Number: 4581162 NR Desc: putative microtubule
  misc_feature: Homolog of GI Number: 2072023 NR Desc: symbiosis
  misc_feature: Homolog of GI Number: 3024687 NR Desc: SYMBIOSIS
  misc_feature: Useful for accelerating flowering time
  misc_feature: Useful for making ornamental plants with modified flowers
  misc_feature: Useful for making plants with increased biomass and foliage
  misc_feature: Useful for making shorter plants
  misc_feature: Useful for making shorter plants and plants with modified flowers
  misc_feature: Useful for making smaller plants
  misc_feature: Useful for modifying plant structure
  misc_feature: Useful for sterility
MARNYFKQEHDLEKRRAEAARIREKYPDRIPVIVEKAERSDIPSIDKKKYLVPADLTVGQFVYVIRKRIKLSAEKAIFIFVDNVLPPTGAIMSAIYDEKKDEDGFLYVTYSGENTFGDLISIQ

SEQ ID NO: 10521 - DNA, 1111 bp, Glycine max
  misc_feature: Ceres CLONE ID no. 1642483
  misc_feature: Ceres CDNA ID no. 36707562
  CDS (92)..(841): REFERENCED BY SEQ ID NO: 10522
atatattcttcattcctctggggtgctgcacaacgaaactcacagaagaaagaagaaaaagaagcgaaactaaagtcagcattcgaaaaagatgagtagcatcggtacaggttacgatctatcggtcaccactttctcccctgatggccgcgttttccagatcgagtatgccgctaaagccgtcgacaacagcgggactgttattgggatcaagtgcaaagatggggttgtgttgggcgttgagaagcttattccgtcgaaaatgatgcttccgggttccaatagaagaatacactccgttcatcgtcactctgggatggctgtagcaggattagcagctgatggcagacaaattgttgccagggctaagtctgaagctactaactatgacagcgtatatggcgaaccaattcctgttaaggaacttgctgaccgtgtggctagttatgtgcacctctgtacgctatattggtggctcagaccttttggatgtggtgtcatactaggaggttatgacagggatggaccacagttgtacatggttgaaccttccggtgtttcctatagatatttcggtgctgcaattgggaagggcaggcaggctgctaaaacagagattgaaaagttaaagcttgctgatatgacatgtcgacaaggggttattgaagtggctaaaattatatatggagttcatgatgaggcaaaggacaaagattttgagctagaaatgagctgggtgtgtgatgagtcaaaccgccaacatgagaaggtcccggatgagcttctagaagaagcaaaggcagctgccaaagcagctcttgaagaaatggatgcagattaatagactagaaatgtttatttcaaagttgcatttcataacttgtaattgagcatttggaacatctataggaaatacaaggcttcgatagtcggattttgtatgcttcttgatgaattaatgcccttgttgatttcctgttactgggagaattgttttgaagttctttagattctgacctttattgatttgtgttgaattctctgtcaaatcctttatgctaatgtgcacatcattgagtttcctttaaaaaaaagaaaaaaaaaaaaaaaa

SEQ ID NO: 10522 - protein, 249 aa, Glycine max
  misc_feature: Ceres CLONE ID no. 1642483
  misc_feature: Ceres CDNA ID no. 36707562
  misc_feature (31)..(216): Pfam Name: Proteasome PFAM Desc: Proteasome A
  misc_feature: Homolog of GI Number: 14594925 NR Desc: putative alpha7 proteasome subunit
  misc_feature: Homolog of GI Number: 2285802 NR Desc: 26S proteasome alpha subunit
  misc_feature: Homolog of GI Number: 50931867 NR Desc: putative proteasome subunit alpha type 3
  misc_feature: Homolog of GI Number: 21617882 NR Desc: 20S proteasome subunit C8
  misc_feature: Homolog of GI Number: 34909168 NR Desc: proteasome subunit alpha type 3
  misc_feature: Homolog of GI Number: 2511592 NR Desc: multicatalytic endopeptidase complex
  misc_feature: Homolog of GI Number: 1809142 NR Desc: multicatalytic endopeptidase subunit C8
  misc_feature: Homolog of GI Number: 60475221 NR Desc: proteasome C8
  misc_feature: Homolog of GI Number: 63694257 NR Desc:  similar to proteasome alpha7/C8 subunit
MSSIGTGYDLSVTTFSPDGRVFQIEYAAKAVDNSGTVIGIKCKDGVVLGVEKLIPSKMMLPGSNRRIHSVHRHSGMAVAGLAADGRQIVARAKSEATNYDSVYGEPIPVKELADRVASYVHLCTLYWWLRPFGCGVILGGYDRDGPQLYMVEPSGVSYRYFGAAIGKGRQAAKTEIEKLKLADMTCRQGVIEVAKIIYGVHDEAKDKDFELEMSWVCDESNRQHEKVPDELLEEAKAAAKAALEEMDAD

SEQ ID NO: 10523 - DNA, 707 bp, Glycine max
  misc_feature: Ceres CLONE ID no. 1642533
  misc_feature: Ceres CDNA ID no. 36706861
  CDS (19)..(441): REFERENCED BY SEQ ID NO: 10524
agagaaagagagagaaagatgtcgaagcgtggtcgtggtggttcggcggggaacaagttccgcatgtcgctgggtcttccagtggcggcgacggtgaactgcgccgacaacacgggggcgaagaacctctacatcatttcggtgaaagggatcaaaggccgtttgaaccgtcttccctcggcctgcgttggcgacatggtgatggccaccgtgaagaagggaaaacccgatctgaggaagaaggtcttgccagctgtcatcgttcgccagcgcaagccatggcgccgaaaggacggcgtctacatgtacttcgaagataatgctggtgttattgtcaatcccaagggagaaatgaaaggttctgctatcactggtcccattggaaaagagtgtgctgatttgtggcctaggattgcaagtgcagctaacgccatcgtttgagtggaatttcttgttatgtttaagcttgtaggatttaagtgtgtctcagattttgtttaagcttgaaattggaatacaagtgatacagatttttaatcattcgtaacttataatcagcttgctttttgaagagacgatattaattattaattaagaattttgttttttgtttcttaaaaaaaaaaaaaaaaaaaaaaaaaaaaaaaaaaaaaaaaaaaaaaaaaaaaaaaaaaaaaaaaaaaaaaaaaaaaaaaaaaaaaaaaaaa

SEQ ID NO: 10524 - protein, 140 aa, Glycine max; identical to SEQ ID NO: 10380
  misc_feature: Ceres CLONE ID no. 1642533
  misc_feature: Ceres CDNA ID no. 36706861
  misc_feature: The plant is abnormally small.
  misc_feature: Useful for making plants with modulated biomass
  misc_feature (19)..(140): Pfam Name: Ribosomal_L14 PFAM Desc: Ribosomal protein L14p/L23e
  misc_feature: Homolog of GI Number: 50915826 NR Desc: 60S ribosomal protein L17
  misc_feature: Homolog of GI Number: 13430182 NR Desc: ribosomal protein L17
  misc_feature: Homolog of GI Number: 32400871 NR Desc: ribosomal Pr 117
  misc_feature: Homolog of GI Number: 57471720 NR Desc: ribosomal protein L17
  misc_feature: Homolog of GI Number: 7547099 NR Desc: ribosomal protein L17
  misc_feature: Homolog of GI Number: 21618149 NR Desc: putative 60S ribosomal protein L17
  misc_feature: Homolog of GI Number: 7440849 NR Desc: ribosomal protein L17
  misc_feature: Homolog of GI Number: 2982289 NR Desc: 60S ribosomal protein L17
  misc_feature: Homolog of GI Number: 4574244 NR Desc: ribosomal protein L17
  misc_feature: Homolog of GI Number: 55645299 NR Desc:  similar to ribosomal protein L23

SEQ ID NO: 10525 - DNA, 742 bp, Glycine max
  misc_feature: Ceres CLONE ID no. 1642624
  misc_feature: Ceres CDNA ID no. 29191356
  CDS (98)..(544): REFERENCED BY SEQ ID NO: 10526
aatcacagctcttggctttagcaaattccaattcccaattcccaattcccaattcgaaacccttattcctttcaaagaaccaaattgagtgatcgtgatggcaccaaaggcagagaagaagccagcggagaagaagcccgcggaggagaagaagtccacggtgggagacaaggctccggcggagaagaagccaaaggccggaaagaagcttccgaaggagggaggcgccggcggagaagggaagaagaagaagagaaacaagaagagcgtggagacatacaagatctacatcttcaaggttctgaagcaggtccaccctgacattggtatctcaagcaaggccatgggaatcatgaacagcttcatcaacgacatcttcgagaagcttgcccaggaatcttctagacttgcccgttacaacaagaagcccaccatcacttcaagggaaattcagaccgcggtcaggcttgtgctgcccggtgaattggccaagcacgccgtctctgagggtaccaaggctgtcaccaagttcactagctcttgaactgactattatgccccttcgcttcgatctaggtgtctctgttaggaatatgttttatgttgaagtgttggtttattttttctttttggtgaaagcaatttgtaagtgaagaatatgggatttgttgatccttctttgtatggaattagttgctaatacagagacgtatattattcctatcaaaaaaaaaaaaaaaaa

SEQ ID NO: 10526 - protein, 148 aa, Glycine max
  misc_feature: Ceres CLONE ID no. 1642624
  misc_feature: Ceres CDNA ID no. 29191356
  misc_feature: No seed is being produced by the plant
  misc_feature: The plant flowers significantly late compared to wild-type.
  misc_feature: Useful for biocontainment applications
  misc_feature: Useful for making plants with modulated flowering time
  misc_feature (55)..(127): Pfam Name: Histone PFAM Desc: Core histone H2A/H2B/H3/H4
  misc_feature: Homolog of GI Number: 2558962 NR Desc: histone H2B1
  misc_feature: Homolog of GI Number: 82400146 NR Desc: histone H2B
  misc_feature: Homolog of GI Number: 21536602 NR Desc: histone H2B
  misc_feature: Homolog of GI Number: 30102580 NR Desc: At3g45980
  misc_feature: Homolog of GI Number: 21554180 NR Desc: histone H2B
  misc_feature: Homolog of GI Number: 21553526 NR Desc: putative histone H2B
  misc_feature: Homolog of GI Number: 3021489 NR Desc: histone H2B
  misc_feature: Homolog of GI Number: 2746719 NR Desc: histone H2B
  misc_feature: Homolog of GI Number: 3021483 NR Desc: histone H2B
  misc_feature: Homolog of GI Number: 21617908 NR Desc: histone H2B
MAPKAEKKPAEKKPAEEKKSTVGDKAPAEKKPKAGKKLPKEGGAGGEGKKKKRNKKSVETYKIYIFKVLKQVHPDIGISSKAMGIMNSFINDIFEKLAQESSRLARYNKKPTITSREIQTAVRLVLPGELAKHAVSEGTKAVTKFTSS

SEQ ID NO: 10527 - DNA, 842 bp, Glycine max
  misc_feature: Ceres CLONE ID no. 1642685
  misc_feature: Ceres CDNA ID no. 36707563
  CDS (126)..(656): REFERENCED BY SEQ ID NO: 10528
aacgagtcatagtcacattttatacaagatccccaatttctctctttttgctcagtttctgttgtattttctcaattacaacatcgtattctgcaaattcaaaccgggtcttggttttctgaaagatgggaggtggcaaggacaagcatcatgatgaatctgacaaaggaattttttcacaccttgctcatggggtagctggtgcagcacatggtggacatgggtacccacctggggcttacccaccaccacctggggcataccctccacaacaaggatatcctccagctgggtatcctccacaacaagggtatcctccagctgggtaccctccacatcaaggctatcctcctgctggttaccccccagctggttatcctggttcatcacatgcaccaggttctcatgggcacggcggtatgggagcaatgctcgctgggggtgctgctgcggctgctgctgcttatggtgctcaccatgtctctcatggctcccatggctcctatggccaatatgcacatggtgctcacatgccacatggaaaattcaagcagcacgggcacggtaagttcaagcatggaaagcatggcaagttcggcaagcatggaaagcatggcaagttcggcaagcatggtggattcaagaagtggaagtgatgaatatgtatctatgactccaaaatgctgctctgtgtagagcttattattgctttataataaaccatactttgaatgatgtgagggatcgatctatgagatcatgatacttgaccccttgttttctttcttgttttttgttactttgatactattggcattggcgaaaaaaaaaaaaaaaaaaaa

SEQ ID NO: 10528 - protein, 176 aa, Glycine max
  misc_feature: Ceres CLONE ID no. 1642685
  misc_feature: Ceres CDNA ID no. 36707563
  misc_feature (38)..(42): Pfam Name: XYPPX PFAM Desc: XYPPX repeat
  misc_feature: Homolog of GI Number: 6478148 NR Desc: putative glycine and proline
  misc_feature: Homolog of GI Number: 33668156 NR Desc: GPRP
  misc_feature: Homolog of GI Number: 21553447 NR Desc: putative glycine and proline
  misc_feature: Homolog of GI Number: 9755790 NR Desc: glycine/proline
  misc_feature: Homolog of GI Number: 297887 NR Desc: glycine rich protein
  misc_feature: Homolog of GI Number: 167666 NR Desc: annexin VII
  misc_feature: Homolog of GI Number: 60473993 NR Desc: annexin VII
  misc_feature: Homolog of GI Number: 671859 NR Desc: annexin VII
  misc_feature: Homolog of GI Number: 113965 NR Desc: Annexin A7
MGGGKDKHHDESDKGIFSHLAHGVAGAAHGGHGYPPGAYPPPPGAYPPQQGYPPAGYPPQQGYPPAGYPPHQGYPPAGYPPAGYPGSSHAPGSHGHGGMGAMLAGGAAAAAAAYGAHHVSHGSHGSYGQYAHGAHMPHGKFKQHGHGKFKHGKHGKFGKHGKHGKFGKHGGFKKWK

SEQ ID NO: 10529 - DNA, 781 bp, Glycine max
  misc_feature: Ceres CLONE ID no. 1642724
  misc_feature: Ceres CDNA ID no. 35383500
  CDS (52)..(555): REFERENCED BY SEQ ID NO: 10530
aatttatctttgcctttgatgtttgtcagctttttcttgcttccatagttcatggcgtgtgttcaagtcatcacagttcttctctttgcattggctcttgcaaaaattgacccctcaacatgccaaatggtgcagggcagagtcttctgcgttgactgcactcacaactatgacttatctgtgaggtgtgatggtgtgaaaaaactggctttggcaactacagaaaatgatggctccttcaaggttgatcttcccttagaccacacaaaaccttcttctgtgaagaattgcttagcaaaacttcttggcgggccagttcagctttatgtctcaagggaaaaccaggtatcccaaattattaagggcaaagagcaaaacagctacaccatctccactccccttagtttcaggacatcatgccccctaaacacaaaatgcaaggctgggaaaaaggttggttcatccaaaactgtggatctccctctgcctccagagtggggattggcaccaagtagctattatgttcctttcttccccatcattggaataccttgatcatgtgctcaagacttcacaagtgatttgtaatcacttgagtaataatacttgtggggggaaatagactgttatatggtcttgtatgttacatatgattatagatgtgtcatgtgtagtagtgtgaaagaatgccacttatagttgtggaatgtactgtatgatagtatgtgaaaagcagataaatactctactggtttgtcaactcaaaaaaaaaaaaaaaaaa

SEQ ID NO: 10530 - protein, 167 aa, Glycine max
  misc_feature: Ceres CLONE ID no. 1642724
  misc_feature: Ceres CDNA ID no. 35383500
MACVQVITVLLFALALAKIDPSTCQMVQGRVFCVDCTHNYDLSVRCDGVKKLALATTENDGSFKVDLPLDHTKPSSVKNCLAKLLGGPVQLYVSRENQVSQIIKGKEQNSYTISTPLSFRTSCPLNTKCKAGKKVGSSKTVDLPLPPEWGLAPSSYYVPFFPIIGIP

SEQ ID NO: 10531 - DNA, 851 bp, Glycine max
  misc_feature: Ceres CLONE ID no. 1642747
  misc_feature: Ceres CDNA ID no. 29191620
  CDS (73)..(618): REFERENCED BY SEQ ID NO: 10532
cttgtaggttctctctctctctcgctctgcataagtttcttatcttctggactgcgagagttgaattaagagatggggttgtctttcaccaagctttttagccggctctttgccaagaaagagatgcgtattctcatggtaggtcttgatgctgctggtaagactaccatcttgtacaagctcaagctgggagaaattgtcacaaccattcccacaattggatttaatgtggagactgtggaatataagaatattagctttactgtatgggatgtgggtggccaagataagattcgtcctttatggagacactacttccaaaacactcaggggcttatctttgttgtggatagcaatgatcgtgaccgtgttgttgaggctagagatgagctccaccggatgttgaatgaggatgagttgagagatgctgttctcctggtatttgccaacaaacaagatcttccaaatgctatgaatgctgcagaaatcacagacaagcttggtcttcattctcttcgccaacgccactggtatatccagagcacatgtgctacctctggggaaggactatatgaaggactggagtggctctccaacaatatagctaacaaggcttagggacattttgtggaatgccgctatttcttgcttattatattatgaggttgatgggttgctgcttctcttatatagcattataatatatatatatattttactcttttaagtcttttctttttctttatttaggtgtttgatactatatcatagcaatcgtattgaatcctgtagaatttttaaataattaatgaattacaaactatacatgacgcgaaaaaaaaaaaaaaaaa

SEQ ID NO: 10532 - protein, 181 aa, Glycine max; identical to SEQ ID NO: 5248
  misc_feature: Ceres CLONE ID no. 1642747
  misc_feature: Ceres CDNA ID no. 29191620
  misc_feature: null
  misc_feature: Useful for making plants with altered Lignin content
  misc_feature: Useful for making plants with altered alkaloid content
  misc_feature: Homolog of GI Number: 77812440 NR Desc: ADP ribosylation factor 002
  misc_feature: Homolog of GI Number: 11131026 NR Desc: ADP
  misc_feature: Homolog of GI Number: 47026845 NR Desc: ADP
  misc_feature: Homolog of GI Number: 50511366 NR Desc: ADP
  misc_feature: Homolog of GI Number: 37791223 NR Desc: ARF
  misc_feature: Homolog of GI Number: 34909214 NR Desc: putative ADP
  misc_feature: Homolog of GI Number: 39653273 NR Desc: ADP
  misc_feature: Homolog of GI Number: 29028258 NR Desc: ADP
  misc_feature: Homolog of GI Number: 77999271 NR Desc: ADP
  misc_feature: Useful for increasing seed/fruit yield or modifying fruit content
  misc_feature: Useful for making ornamental plants with modified leaves
  misc_feature: Useful for sterility

SEQ ID NO: 10533 - DNA, 680 bp, Glycine max
  misc_feature: Ceres CLONE ID no. 1642780
  misc_feature: Ceres CDNA ID no. 36707454
  CDS (74)..(379): REFERENCED BY SEQ ID NO: 10534
gctgaaaatttactgagaaaatcagataacctctgtcaacacctgtctgtggcgcgcgagagagaaatcggagatgtcatcaaaccctaacgatcctcgtcagccctcggcggcgagaccctacgtggcgccgcagatttcgccgcaggaccttccgatcgactacgccggcttcatcgccgtcatatttggcgtcgccggcgtcatgttcaggtacaaactgagctcttggctggcgctcatattctgcgcgcaatccgtcgcgaacatgcggaatgtcgagaacgatctcaaacaagttatgatggctatgatgttttctttaatgggattgataacaaactactttggacctcctagacccggcaaacaaagttgagatctcaagattttgaggcagaaaaaacctttttgtggggtcttttcgggaattaaccaacaagcgtgaaaggaagttttagagtgtcattgaaatgtttcactgttcttcgtgttaaagatgcttgcgaagactggatacctgcgtatttggataattttatagtttattgatatttatatattagagatggagatggtctgaaatatgaggagagctatatttcctctttatgctactgtaatatttttattgttaatttatttgaaattatagtcttttaataaaaaaaaaaaaaaaa

SEQ ID NO: 10534 - protein, 101 aa, Glycine max
  misc_feature: Ceres CLONE ID no. 1642780
  misc_feature: Ceres CDNA ID no. 36707454
  misc_feature (2)..(101): Pfam Name: UPF0139 PFAM Desc: Uncharacterised protein family
  misc_feature: Homolog of GI Number: 46250139 NR Desc: MGC81480 protein
  misc_feature: Homolog of GI Number: 49522721 NR Desc: MGC82186 protein
  misc_feature: Homolog of GI Number: 12654705 NR Desc: PTD008 protein
MSSNPNDPRQPSAARPYVAPQISPQDLPIDYAGFIAVIFGVAGVMFRYKLSSWLALIFCAQSVANMRNVENDLKQVMMAMMFSLMGLITNYFGPPRPGKQS

SEQ ID NO: 10535 - DNA, 2035 bp, Glycine max
  misc_feature: Ceres CLONE ID no. 1643206
  misc_feature: Ceres CDNA ID no. 40041525
  CDS (650)..(1858): REFERENCED BY SEQ ID NO: 10536
aaaagtggaaaattgaagaaaggattccaacaattggaaatttggaatcacccataaacagaagaaaaaaactcttctttttccttctctgcgatttctcagctttcactcttcgctttcctttttcaggtgcaaagcttcaataacgtaactgccatttttatttttaatttaattattattgttgctttacgtgcaagcttctcctatttctcccgtccagggaaagaagaatcctacgttaacatttttgggggaaattcaacccatgattctgtgaggtttgtttcagcgtaaacgttgcttgtttgggtatttgaggtaacagaggagaaaaagctgaaaactttttctgccttgtgattttgttgatttcatgggtttagggttgctctccttaggcaaatggggttttgaaatgattggctattattaattttgctgtaagtgggaattttttgtttttgggttttgtctaggtcagatttggaaagaaaaaaagtttcttttttttgtgggatgttctgtggaatgtcgtggtgcggattaagggttgacttcttttgaaagtttggaaattgattggtgtttgagttttgaattggggaggttgagattttggagtagtgattgaggtttggttcgagtgatggatgatgcacagggtagttcaagttccctgccccctttcctggcaaagacttatgagatggtggatgatccttccacggattcggttgtttcgtggagtatcactagcaagagtttcattgtatggaatcccccagaatttgccagggatttgctgcctagattctttaagcacaacaacttctcaagtttcatcaggcagctgaacacatatggatttagaaaagttgacccagaacaatgggaatttgccaatgatgattttgttagagggcagcctcatcttatgaagaacatccatagacggaagccggttcatagccattctttgcagaatctccaagcacaaggcccaataggggaggcagaaaggcagagttttactgatgaaatagagaagcttaaacacgataaagagcaactcctcgtggaattacagaaatatcagcatgagtggcaggcatatgagatacaaatgcattcctcaaaagatcggttggaaaagttggaacagaatcaacaaaagatggtttcttctgtttctcatgtattgcagaaacctgtgatttctgtaaatatcttgcctctgacagaaaccatggatagaaagcgaaggttgccgagaagtggccacttttatgatgaagctagcgttgaagatgctatggaaacttcccaaatgttaccaagagaaaatgcagacaataccactgtcttgacgttaaatgtggagcgactggatcagcttgaatcatccatggcattttgggaggctattgtacatgatattggtgacaccttcgtccaaattcagtcaaacatggattttgatgaatctacaagttgtgctgatagtccatctatatcttgtgcacaattagatgttgaagttcggcctaagtcacctggaattgacatgaactctgagccaactacagctgctgttcctgagcctgttgcatcaaaagaacaacctgcaggaaccactgttgcagcaactggtgttaatgatgtattctgggagcagttcttgactgaggatcctggtgcatcagaaacacaggaagtgcagtcagaaagaaaggaatatgatggcagaaagaatgaaggaaaacccagcgaccttaacaaattttggtggaacaaatggaatgcaaataatcttccagaacagatggggcatgttggtcaagcagagaaaacatagtggcaattgattattcttcttgcttgtactgttctacaatcacatgtaataaatataggtatgcacagttttctgatttttctctacaatagatacatattccatattttgggtgggatgaatgtttcatccttcattgattcattagttaagtatgccgaaaaaaaaaaaaaaaaa

SEQ ID NO: 10536 - protein, 402 aa, Glycine max
  misc_feature: Ceres CLONE ID no. 1643206
  misc_feature: Ceres CDNA ID no. 40041525
  misc_feature (12)..(117): Pfam Name: HSF_DNA PFAM Desc: HSF
  misc_feature: Homolog of GI Number: 20162459 NR Desc: heat shock transcription factor
  misc_feature: Homolog of GI Number: 16118447 NR Desc: heat shock transcription factor
  misc_feature: Homolog of GI Number: 5821138 NR Desc: heat shock factor
  misc_feature: Homolog of GI Number: 24111359 NR Desc: At4g18880/F13C5_50
  misc_feature: Homolog of GI Number: 3399765 NR Desc: heat shock transcription factor 21
  misc_feature: Homolog of GI Number: 33771680 NR Desc: heat shock factor RHA1
  misc_feature: Homolog of GI Number: 33591114 NR Desc: heat shock factor RHSF10
  misc_feature: Homolog of GI Number: 51964046 NR Desc: PREDICTED P0040H05.33 gene product
  misc_feature: Homolog of GI Number: 16580745 NR Desc: spl7 protein
  misc_feature: Homolog of GI Number: 33591112 NR Desc: heat shock factor RHSF9
MDDAQGSSSSLPPFLAKTYEMVDDPSTDSVVSWSITSKSFIVWNPPEFARDLLPRFFKHNNFSSFIRQLNTYGFRKVDPEQWEFANDDFVRGQPHLMKNIHRRKPVHSHSLQNLQAQGPIGEAERQSFTDEIEKLKHDKEQLLVELQKYQHEWQAYEIQMHSSKDRLEKLEQNQQKMVSSVSHVLQKPVISVNILPLTETMDRKRRLPRSGHFYDEASVEDAMETSQMLPRENADNTTVLTLNVERLDQLESSMAFWEAIVHDIGDTFVQIQSNMDFDESTSCADSPSISCAQLDVEVRPKSPGIDMNSEPTTAAVPEPVASKEQPAGTTVAATGVNDVFWEQFLTEDPGASETQEVQSERKEYDGRKNEGKPSDLNKFWWNKWNANNLPEQMGHVGQAEKT

SEQ ID NO: 10537 - DNA, 1756 bp, Glycine max
  misc_feature: Ceres CLONE ID no. 1643294
  misc_feature: Ceres CDNA ID no. 40041526
  CDS (435)..(1655): REFERENCED BY SEQ ID NO: 10538
tatgtctgggtgtgtgcttcgtttctgggattttgctctgtttcttctgtctctgtggctgtgtgtgcttagctttgccttttttttcttctttttctgcataaataaaaaacagaagcagaagcaacagcagcagcggaagaagaacaagaagcaaaattcagaatcgcctattcactatccatttgggggttaggttaaggttagtttacttagctcgctcgaatcgaaaaaaaaaagaaaggaagagaataagcgttgatacaccgcggaatctcacagcatcacactatctacagggtttgtggttgtaggtgcacacacctctctctcttttcttccactgtctctttttccttctagattgattgcttctactactaataaagagtttttgtttctagcatagcatcgaataaattattattattattatggaggacgggagtagggttccggcgggggatgacccgtcttactggctggatgcgtgtgaggacatatcgtgtgatgatttcattgattttgatgtctcttccatcgtcgtctctgaccagcctgacaacccttccaatcaggacttcttcggtggcattgataagattttggacagcatcaagaacggtgctggtctccctctcaatcatgctgctgctgaaccacccagtaatgtcactgcagcagcatcaggaggagcagaagtgtgcttgccttccaatgccactccggaggattcttttgaccattctggtggcgctgctctgagtaacggctccagtaagcagtctaatgggaacgaaacgggagttttggttgattattctcaggaaagggggacacccactctgaatggaggccttgattttgatggtgaagaaaggtgcagcaaaagggctcggcttggtggctacaataatgatcggccttatcatggtagagggaattatcaaggcaaggagagggagaggtgttttagtaataacaggaagaggccgcgggggggtagggatgaaattgataggagggataaggatggtggtggaaggaaaagagaacattgtggtgctgttggcaggagggatgttagagatagggattggagggatagagaaactaggggttactgggagagggataagtctggttccactgatatggtctttcgcacgggtgcttgggaacctgattgtaatcgagaagacaaaatggcgattgacatgaaactggagaaaaatggaaaccttgataagaagtccgaggaggctaaggagagggttcctgaggaaaaagctagacagtatcagttggatgttcttgagcaggcaaagaggaaaaatactatagcttttcttgaaactggagcagggaaaaccttaattgctgttcttctcattaaaagtatacaggagagtttgcataagcaaaataagaaaatgcttgcagtatttttagttccaaaagttccacttgtttaccagcaagccgaagtaattcgtgagcggactggttatcaagtaggccactattgtggagaaatggggcaggatttttgggatgctcgaaggtggcagcgtgaatttgacaccaaacatgtatgttttgaaatttctattgaagatatgctggcctgtgcctgctgtcactttgtgttttagtctattgatgtggtatgcttttatatatggttattctgtacagtatagcattttctgaattcagattctcttttcttcttcaaaaaaaaaaaaaaaaaaaa

SEQ ID NO: 10538 - protein, 406 aa, Glycine max
  misc_feature: Ceres CLONE ID no. 1643294
  misc_feature: Ceres CDNA ID no. 40041526
  misc_feature (286)..(358): Pfam Name: DEAD PFAM Desc: DEAD/DEAH box helicase
  misc_feature: Homolog of GI Number: 6102610 NR Desc: CAF protein
  misc_feature: Homolog of GI Number: 34922211 NR Desc: Endoribonuclease Dicer homolog
  misc_feature: Homolog of GI Number: 6715634 NR Desc: T25K16.4
  misc_feature: Homolog of GI Number: 34902240 NR Desc: Putative CAF protein
  misc_feature: Homolog of GI Number: 50399920 NR Desc: putative RNA helicase/RNAseIII protein
  misc_feature: Homolog of GI Number: 50726394 NR Desc: CAF protein
  misc_feature: Homolog of GI Number: 50399921 NR Desc: putative RNA helicase/RNAseIII protein
  misc_feature: Homolog of GI Number: 42563454 NR Desc: DEAD/DEAH box helicase carpel factory
  misc_feature: Homolog of GI Number: 56785369 NR Desc: putative Endoribonuclease Dicer homolog
  misc_feature: Homolog of GI Number: 50926364 NR Desc: OSJNBb0065L13.5
MEDGSRVPAGDDPSYWLDACEDISCDDFIDFDVSSIVVSDQPDNPSNQDFFGGIDKILDSIKNGAGLPLNHAAAEPPSNVTAAASGGAEVCLPSNATPEDSFDHSGGAALSNGSSKQSNGNETGVLVDYSQERGTPTLNGGLDFDGEERCSKRARLGGYNNDRPYHGRGNYQGKERERCFSNNRKRPRGGRDEIDRRDKDGGGRKREHCGAVGRRDVRDRDWRDRETRGYWERDKSGSTDMVFRTGAWEPDCNREDKMAIDMKLEKNGNLDKKSEEAKERVPEEKARQYQLDVLEQAKRKNTIAFLETGAGKTLIAVLLIKSIQESLHKQNKKMLAVFLVPKVPLVYQQAEVIRERTGYQVGHYCGEMGQDFWDARRWQREFDTKHVCFEISIEDMLACACCHFVF

SEQ ID NO: 10539 - DNA, 1542 bp, Glycine max
  misc_feature: Ceres CLONE ID no. 1643747
  misc_feature: Ceres CDNA ID no. 40041527
  CDS (11)..(1108): REFERENCED BY SEQ ID NO: 10540
aggaaactcaatgttctcaagcccattcgtgttaaccttctctctccttctctccctcccaatcctcttcttccttgccccacggatcctccctccaaagccccattccttcccccccatctccccctccgacgagctcgatgacatcaacctcttcaaccgcgccatttcccattccagcaattcccattccaacccttccaaattcttccacctctcctccaaaaacccctctctcaaaatcgccttcctcttcctcaccaacaccgatctccacttctcccccttatgggacctcttcttctcttcctccccttcccacctcttcaacatttacatccactctgacccctccttcaacctcactctccctctttcccctcttttccgtaacaaattcatctcctccaaacccaccttccgctcctcccctacccttatctccgccactcgccgcctcctcgcctccgctctcctcgacgacccttccaacgcctacttcgccctcctctcccagcactgcatccctctccactccttcaaatacacctacaactccctcttcctctccccaaccttcgattccgaaaaccccgaatcctcgtcccgcttcggcctccgcctcaaatacaaatccttcgtcgagatcctctcccacgcgcccaagctctggaggcgctactcctcccgcggacgctacgccatgatgccggagatccccttcgaagatttccgcgtgggctctcagttcttcacgctcacgcgccgccacgcgctcgtcgtcgttaaggacaggacactttggaggaaattcaagatcccgtgttaccgtgacgatgagtgttaccccgaggagcattattttcctaccctgttgtccatggcggatcctgatggatgcaccaaatacacgctcacgagtgttaactggaccggcaccgtcaacggccatccttacacttaccggccgacggaaatctcgccggaactcattctccggctccggaagtccaatcattccgagtcttacctcttcgccaggaaattcaccccggattgcttggagcccttgatgcgcattgctaaatcggtcatcttcagggattgaaattcaaattgtggaaaaggtctgtgaagagatttatggtgtgagatgatattttgcttgctgttgctgtgactgtaggttgatggtggtgtatagtttgaagaggcacgaacagcccacatcctatatgcatacctggaactctcaaattgagagacttgggatcttacacgaacgagggaatcaaatcaaatcatatacaaagcaaagaaataggtaaacacctgcgtgagttgaaaaggaaatgcgggtggtgctctaggcaagtgtatttagttgggatgcaagtgctaaagtaattgctaatttggcatagaagattgtgtaggtagttcttccttttgtgggatggttttgtacataagagttgtgtaaacattgtttaaaagctctacagtgttactacttttgaacaaaaaaaaaaaaaaaaaaaa

SEQ ID NO: 10540 - protein, 365 aa, Glycine max
  misc_feature: Ceres CLONE ID no. 1643747
  misc_feature: Ceres CDNA ID no. 40041527
  misc_feature: Homolog of GI Number: 72547036 NR Desc: proteophosphoglycan 5
  misc_feature: Homolog of GI Number: 72547023 NR Desc: proteophosphoglycan ppg4
  misc_feature: Homolog of GI Number: 188864 NR Desc: mucin
  misc_feature: Homolog of GI Number: 72547041 NR Desc: proteophosphoglycan ppg1
  misc_feature: Homolog of GI Number: 186396 NR Desc: mucin
  misc_feature: Homolog of GI Number: 72547018 NR Desc: proteophosphoglycan ppg3
  misc_feature: Homolog of GI Number: 4505285 NR Desc: mucin 2
  misc_feature: Homolog of GI Number: 12018147 NR Desc: vegetative cell wall protein gp1
  misc_feature: Useful for making plants with altered leaf shape eg curled leaves
MFSSPFVLTFSLLLSLPILFFLAPRILPPKPHSFPPISPSDELDDINLFNRAISHSSNSHSNPSKFFHLSSKNPSLKIAFLFLTNTDLHFSPLWDLFFSSSPSHLFNIYIHSDPSFNLTLPLSPLFRNKFISSKPTFRSSPTLISATRRLLASALLDDPSNAYFALLSQHCIPLHSFKYTYNSLFLSPTFDSENPESSSRFGLRLKYKSFVEILSHAPKLWRRYSSRGRYAMMPEIPFEDFRVGSQFFTLTRRHALVVVKDRTLWRKFKIPCYRDDECYPEEHYFPTLLSMADPDGCTKYTLTSVNWTGTVNGHPYTYRPTEISPELILRLRKSNHSESYLFARKFTPDCLEPLMRIAKSVIFRD

SEQ ID NO: 10541 - DNA, 1545 bp, Glycine max
  misc_feature: Ceres CLONE ID no. 1643805
  misc_feature: Ceres CDNA ID no. 25893031
  CDS (66)..(1481): REFERENCED BY SEQ ID NO: 10542
accaaaattctccatatatccttcacatattcttctcttcccttcctttctctctctacactcccatggagttgctctacctactctacctggttccaacgttgtacgcgtgtttcctcatctggaagatgttcgacgagaaaagggacagggagtgctacatcctaaactaccaatgctacaagccccccaacgacagaatgctcggcaccgagttctgcggcaagctcatcagacgcaccgaaaacctgggccccagcgagtaccggttcctcctcaaagccatcgtcagctccggcatcggtgaacaaacgtacgccccaagaaacatcttcgagggccgcgaggcttctcccacactgcgcgacggcattggagaaatggaagaattcttccacgacagcatcgggaaactcctcgcaaaatccaacgtttccccctccgaaatcgacgtcctggtcgtcaacatctccatgctcgccaccgtcccttccctctcctcgcgaatcatcaaccactacaaaatgcgccacgacgttaaagtctacaacctcgccggcatgggctgcagcgctagtctcatctcaatggacatagtcaaaagcattttcaagacgcagcgtaacaagctcgcgctgttgatcacttctgagtctctgagtccaaattggtacacaggaagcgacagatccatgattctcgccaactgtctcttccgttctggtggctgcgcgattcttttgacgaacaaaagatcgttgaaggacaaagccatgctgaggttaaagtgtttggtgagaacgcatcacggtgctagagaagaagcttatggttgctgtatccagcaggaagacgttgaaggaaggcttgggtttcatcttgggaagactcttcccaaggctgccacccgagccttcgttgataatcttcgggtcatagcacctaagatattacctatccgtgagcttctgaggtttatgttcgcctcccttgttaaaaaaatcaacaagaatactaacgctcccaagtccgtcgcgagcaccggagcgacgaaatctccgttgaacttccgaaccggagtcgaccatttctgccttcacaccggaggaaaggcggtgatcgacgggatcggaatgagcttggatctgagcgagtacgacctggaaccggcgaggatgacgctgcaccggttcgggaacacgtcggcgagtagcttgtggtacgtgctgtcgtacatggaagcaaagaagaggctgaagaaaggggacgcagtgttcatgataagctttggtgcgggctttaaatgtaacagctgtttgtgggaggtgatgaaggacttgggggacgccaatgtgtgggacgattgcattgatgagtacccaccagagtcattggccaaccccttcatggagacctatggttggatcaatgaagttgatgatccgttcacttacgaacatcttccagaatttctcaagtgattattgttgatgatgttgtgtattagtatgcatgttggccagctacaaaaaaaaaaaaaaaaaa

SEQ ID NO: 10542 - protein, 471 aa, Glycine max
  misc_feature: Ceres CLONE ID no. 1643805
  misc_feature: Ceres CDNA ID no. 25893031
  misc_feature (344)..(400): Pfam Name: Chal_sti_synt_C PFAM Desc: Chalcone and stilbene synthases
  misc_feature: Homolog of GI Number: 28951053 NR Desc: At5g04530
  misc_feature: Homolog of GI Number: 50915800 NR Desc: putative fatty acid elongase 3
  misc_feature: Homolog of GI Number: 31432631 NR Desc: putative fatty acid elongase 3
  misc_feature: Homolog of GI Number: 21536949 NR Desc: putative fatty acid elongase
  misc_feature: Homolog of GI Number: 20259583 NR Desc: putative fatty acid elongase
  misc_feature: Homolog of GI Number: 50920821 NR Desc: putative fatty acid elongase
  misc_feature: Homolog of GI Number: 50920841 NR Desc: putative fatty acid elongase
  misc_feature: Homolog of GI Number: 50932775 NR Desc: putative beta
  misc_feature: Homolog of GI Number: 1045614 NR Desc: beta
  misc_feature: Homolog of GI Number: 11066477 NR Desc: fatty acid elongase 1
MELLYLLYLVPTLYACFLIWKMFDEKRDRECYILNYQCYKPPNDRMLGTEFCGKLIRRTENLGPSEYRFLLKAIVSSGIGEQTYAPRNIFEGREASPTLRDGIGEMEEFFHDSIGKLLAKSNVSPSEIDVLVVNISMLATVPSLSSRIINHYKMRHDVKVYNLAGMGCSASLISMDIVKSIFKTQRNKLALLITSESLSPNWYTGSDRSMILANCLFRSGGCAILLTNKRSLKDKAMLRLKCLVRTHHGAREEAYGCCIQQEDVEGRLGFHLGKTLPKAATRAFVDNLRVIAPKILPIRELLRFMFASLVKKINKNTNAPKSVASTGATKSPLNFRTGVDHFCLHTGGKAVIDGIGMSLDLSEYDLEPARMTLHRFGNTSASSLWYVLSYMEAKKRLKKGDAVFMISFGAGFKCNSCLWEVMKDLGDANVWDDCIDEYPPESLANPFMETYGWINEVDDPFTYEHLPEFLK

SEQ ID NO: 10543 - DNA, 1674 bp, Glycine max
  misc_feature: Ceres CLONE ID no. 1643901
  misc_feature: Ceres CDNA ID no. 40041528
  CDS (44)..(1444): REFERENCED BY SEQ ID NO: 10544
gctgataatatatccaatacattgttatactatcgacgacattatggctgcttcattctcaagcatgctcattattccctcttccaaaataagctacgaagctagcttgggaggattaagcttccacaacttcctaacagcaaaatcaccacctctgaagcgaaaccaaaagtcaataaaagttgttacacgcgataaccactcacccctggtcgacgacctcatgatagaagtacaagaacatgaacatgaacatgcaacgctgcatcagaaagatctctcagaaatgtggcgccaaatccacggtgagaagaactgggaagggcttctagagcccatggaccctcttttgaggtcggaggtgatccgctacggcgagctggcgcaggcctgccacgacgccttcgactacgagccattctctaggtactgcggcacatgcaggttcgaggaggagaagttcttctcctccctgggcatgacccatcacggatacaaggtgacgcgctacatccacctcacggccaacaccgacttcctcctaaagtggttgattcactcaaagtggccaacggcgatggggagcaaggtgaactggggcggatatgtggcagtttcgaacgacgacacgagtcgctgcctcgggagaagagacatcgtgattgcatggcgggggacgaccacacacctggaaggggagaaggacctcaggtctagcctcacacctgtatcatccaagggcatcccgtgccacgatgatggggttaaggtcgacaatgggttcttagatatgtacacgggtaaagatgagacatcagaatactgccagcactcggcgagagatcacgttctaagggaggtgaagcggttgatggacatgtatagtgaggaggaagtgagcattacggtgacggggcatagtctggggagtgctttggcgattttgagcgcttatgatattgtcgaaaaggggttggacaggggtgtgccggtttcggtgatgtcgttttctggtcccgcggttgggaacaagtcttttcataaaaggttgaagaagcttgggataaaggtgttgagggtgatcaacgcgaatgattgggtgccctggttttctctttggttgcctccttttcaatactaccatgttggagtggaactcaagttggacaacaacaaatcaccgtttttgaaacacgatgtagactgtgcccataacttggaggttcttctgcatttgctcgacggataccatggagagcggggggaattcatgctagcgagtgatagggatcatgctctggtgaacaagggaggtgatttcctgaaagaaagttacttggttccaccaaactggtggcaagatgaaaacaagggcttgaagaggagctcagatggacgctgggtacagcctgagcgaacaattgaggtcgacggttacccttaagatatgcatgcagcatcaccttctcacccaactgggtctccatctttttcatttgatatatatatatatatatatgaattaattaatatatattattggaggaggagaatgcatgtgtgttgcagttattatagtactatatattgatatacaagtgtgtaaggattattattatgcatgtttatggtaagggttgccgcctttatgttcaaaaaaaaaaaaaaaaaaaa

SEQ ID NO: 10544 - protein, 466 aa, Glycine max
  misc_feature: Ceres CLONE ID no. 1643901
  misc_feature: Ceres CDNA ID no. 40041528
  misc_feature (206)..(354): Pfam Name: Lipase_3 PFAM Desc: Lipase
  misc_feature: Homolog of GI Number: 20466266 NR Desc: lipase
  misc_feature: Homolog of GI Number: 23296757 NR Desc: putative lipase
  misc_feature: Homolog of GI Number: 50931313 NR Desc: 'putative lipase class 3 family protein
  misc_feature: Homolog of GI Number: 12322127 NR Desc: lipase
  misc_feature: Homolog of GI Number: 27363430 NR Desc: At1g06800/F4H5_10
  misc_feature: Homolog of GI Number: 30684625 NR Desc: lipase class 3 family protein
  misc_feature: Homolog of GI Number: 50932763 NR Desc: putative lipase
  misc_feature: Homolog of GI Number: 34911830 NR Desc: lipase
  misc_feature: Homolog of GI Number: 34911870 NR Desc: lipase
  misc_feature: Homolog of GI Number: 56784140 NR Desc: lipase
MAASFSSMLIIPSSKISYEASLGGLSFHNFLTAKSPPLKRNQKSIKVVTRDNHSPLVDDLMIEVQEHEHEHATLHQKDLSEMWRQIHGEKNWEGLLEPMDPLLRSEVIRYGELAQACHDAFDYEPFSRYCGTCRFEEEKFFSSLGMTHHGYKVTRYIHLTANTDFLLKWLIHSKWPTAMGSKVNWGGYVAVSNDDTSRCLGRRDIVIAWRGTTTHLEGEKDLRSSLTPVSSKGIPCHDDGVKVDNGFLDMYTGKDETSEYCQHSARDHVLREVKRLMDMYSEEEVSITVTGHSLGSALAILSAYDIVEKGLDRGVPVSVMSFSGPAVGNKSFHKRLKKLGIKVLRVINANDWVPWFSLWLPPFQYYHVGVELKLDNNKSPFLKHDVDCAHNLEVLLHLLDGYHGERGEFMLASDRDHALVNKGGDFLKESYLVPPNWWQDENKGLKRSSDGRWVQPERTIEVDGYP

SEQ ID NO: 10545 - DNA, 1285 bp, Glycine max
  misc_feature: Ceres CLONE ID no. 1644460
  misc_feature: Ceres CDNA ID no. 40041529
  CDS (53)..(886): REFERENCED BY SEQ ID NO: 10546
atgaaacaaacagaacagagcactctgcttctctttctctccacttcccaccatgccccgccccggttccaaaccttacgattgcgtcaaaagagcttggcacagtgaaatacaccaacccatcagaggaactctcattcaagaaattttcagggttgtcaacgagatacatgggtcttctactaagaagaacaaagagtaccaagagaagctacccgttgttgtgctcagggcagaggaaattatttactctaaagccaattccgaggctgaatacatggatcttaaaacacttttggagagaacaaatgatgctattgatacaataattcgacgtgatgagcacacagaaactggagagtatttgtgcccttgcatcgaagctgctctgagtttgggttgctccctaacaaaagccacaaggagtcaacgcaacaaccaacgatgctacctaagtcgcagtaccgaagaggttccaaaactttctcatggcacgttgcttaataacccaaatacaaaggatcataataacacaaagtctcaatatgtgtccgagaatgtaccttcagctagtaaaaagcaatgcgtggaacatcaagctccaccaaaattgtgttcagtttatcctctgtactatgggaacaacaataacaacatccaacatgacaattcacaacatcatcatcatggattcaaagtatcacatgtatctgtttctcacactggtggacctgcccttgttggtggtggtggtgctaggaatctactagccaataacttaaaaaattcttcaagtgggggatcccaattattcattattaaaggggattttgtgaatccatgcacacaaaaatgtgatctatcattgaggttaggacccccttagtgtaccatcatcccctagttttgaaaaatggtcagattcaggaaactgaagtttgaaacaggcaattgttcgaacctcccagaagggtaaaaagttggagcttcaaaggacaattatgtgagaatgcaaccaacaacggtacaattaactgaacgcatattttagatgttttgtttgaagccaaagatagtgtgtactaactttgagaatttgtggtctctagtgtgtgatttgctatgcttcttggaaagcctaggcattattgtacttgagatgttgatctcagttatgtgttagtgttagtactaatgggttatgtaaataataacttcaatcagaattgtaacggtggattagtagcatgtgttcggttttgtgtaaaaaaaaaaaaaaaaaaaa

SEQ ID NO: 10546 - protein, 277 aa, Glycine max
  misc_feature: Ceres CLONE ID no. 1644460
  misc_feature: Ceres CDNA ID no. 40041529
  misc_feature: Useful for making plants with altered leaf shape eg curled leaves
MPRPGSKPYDCVKRAWHSEIHQPIRGTLIQEIFRVVNEIHGSSTKKNKEYQEKLPVVVLRAEEIIYSKANSEAEYMDLKTLLERTNDAIDTIIRRDEHTETGEYLCPCIEAALSLGCSLTKATRSQRNNQRCYLSRSTEEVPKLSHGTLLNNPNTKDHNNTKSQYVSENVPSASKKQCVEHQAPPKLCSVYPLYYGNNNNNIQHDNSQHHHHGFKVSHVSVSHTGGPALVGGGGARNLLANNLKNSSSGGSQLFIIKGDFVNPCTQKCDLSLRLGPP

SEQ ID NO: 10547 - DNA, 1600 bp, Glycine max
  misc_feature: Ceres CLONE ID no. 1644784
  misc_feature: Ceres CDNA ID no. 29191794
  CDS (29)..(1480): REFERENCED BY SEQ ID NO: 10548
atatcaccataactgctatgatcacataatggaagccatttccaaccaaaaccatgttcctctcttccatgcaatcccccctgaccaattcactctcttgtcaaaggtcctttcaaaactctcaattcttctttggccttgtaccttcttaattgaagcattcttacttgtgcaaaactgggacctactgttccattttgtgctaccatgtttcctccttctttgtttcctggtgaagcacttcctctcaaagccctctcccatttaccttgtggatttctcatgtcttaaacctccaagccactgcagggtgcctttcactacatttcttgaaaatgcttccatgttggaggtttttgacagtgaaagcatagctttcatggccaaagtcctccattcctcgggacaaagtgaagaggcatgcctccccccttccttgcactacattcctccaaacactcaccacacagaatccatcaaagaggtgcaaatggttcttttccccatcgtggaagatcttctagcaaaaaccaacctttcaccccttgatatagacatacttatcataaactgcagtggcttttgctcctcaccttctctaacctccattgttattaacaaatactctatgagaaatgacattaagagctataatatctctggcatggggtgcagtgcaagtgccctttgcattgatttggctcagaatcttctgagtgttcacaagaactctaatgccattgtcctcagcacagagattttgtcaacaggttggtattcaggcaatgaaaagtccaagttgctgattaattgcctctttcggatgggaagtgcagcaatccttctctcaaacaagaaagaagcaaagaaaactgcaaagtacaggttggtcaggacacttagaacccagagagcctttgatgacaaatcttatttttctgccataagggaagaagattctgatggaaaacttggggtgacactgaagagggacttgcttcaggtggctggtgaaactctccgtacaaacatctccattttggggtctgaaatcttgcatctttcagagaagttttcgtatggagtttctgtgatcaagaagaggttcatcaagtctgagggaatttacgtgccaaatttcaagacagtgatacagcacttctgcttgccatgttctgggaggccagtgataagagagatagggaaagggttgaagctctcagagagagacattgaacctgctttgatgacactgcacaggtttgggaaccagtcttcttcctcgctgtggtatgaactagcttacttggaagccaaggaaagagtacacaagggagacaaggtttggcagcttggaatgggaagtggacccaaatgcaacagtgttgttctgaagtgtattaggcctatagttggagagtacgagaagggaccatgggctgattgtatcaatcagtacccaatattagccttggactaggaattctaacttggttatagctagaattctaaaaaaaaaaaaaaaaaaaaaaaaaaaaaaaaaaaaaaaaaaaaaaaaaaaaaaaaaaaaaaaaaaaaaaaaaaaaaaaaaaaaaaaaaa

SEQ ID NO: 10548 - protein, 483 aa, Glycine max
  misc_feature: Ceres CLONE ID no. 1644784
  misc_feature: Ceres CDNA ID no. 29191794
  misc_feature: Homolog of GI Number: 21618184 NR Desc: fatty acid condensing enzyme CUT1
  misc_feature: Homolog of GI Number: 20334738 NR Desc: At1g68530/T26J14_10
  misc_feature: Homolog of GI Number: 12321497 NR Desc: fatty acid condensing enzyme CUT1
  misc_feature: Homolog of GI Number: 12324880 NR Desc: very
  misc_feature: Homolog of GI Number: 21593111 NR Desc: very
  misc_feature: Homolog of GI Number: 28393607 NR Desc: putative fatty acid condensing enzyme CUT1
  misc_feature: Homolog of GI Number: 25402889 NR Desc: protein F18O14.21
  misc_feature: Homolog of GI Number: 32172502 NR Desc: FAE1
  misc_feature: Homolog of GI Number: 50912441 NR Desc: putative very
  misc_feature: Homolog of GI Number: 28973575 NR Desc: putative beta
  misc_feature: Useful for delaying flowering time
  misc_feature: Useful for making ornamental plants with modified leaves
  misc_feature: Useful for making plants with increased biomass and foliage
  misc_feature: Useful for making shorter plants
MEAISNQNHVPLFHAIPPDQFTLLSKVLSKLSILLWPCTFLIEAFLLVQNWDLLFHFVLPCFLLLCFLVKHFLSKPSPIYLVDFSCLKPPSHCRVPFTTFLENASMLEVFDSESIAFMAKVLHSSGQSEEACLPPSLHYIPPNTHHTESIKEVQMVLFPIVEDLLAKTNLSPLDIDILIINCSGFCSSPSLTSIVINKYSMRNDIKSYNISGMGCSASALCIDLAQNLLSVHKNSNAIVLSTEILSTGWYSGNEKSKLLINCLFRMGSAAILLSNKKEAKKTAKYRLVRTLRTQRAFDDKSYFSAIREEDSDGKLGVTLKRDLLQVAGETLRTNISILGSEILHLSEKFSYGVSVIKKRFIKSEGIYVPNFKTVIQHFCLPCSGRPVIREIGKGLKLSERDIEPALMTLHRFGNQSSSSLWYELAYLEAKERVHKGDKVWQLGMGSGPKCNSVVLKCIRPIVGEYEKGPWADCINQYPILALD

SEQ ID NO: 10549 - DNA, 1153 bp, Glycine max
  misc_feature: Ceres CLONE ID no. 1644810
  misc_feature: Ceres CDNA ID no. 35383502
  CDS (73)..(525): REFERENCED BY SEQ ID NO: 10550
agtttgcagcatcagctttgaacgccgaagaaggttcatccaatccccgaagcccttcaccgcattgcaaccatgtcgaggagaaaggtcagagagccaaaggaagaaaacgtgactctgggcccagctgttagagatggtgaacatgtctttggcgtcgctcgcatctttgcctccttcaatgataccttcattcatgtcactgatttgtctgggagggaaacgcttgtccgcatcactggtggaatgaaggttaaggctgacagagatgaatcgtctccttatgctgctatgcttgcagctcaggatgttgctgccagatgcaaggaacttggcataactgctcttcatatcaagctccgtgccactggtggaaacaagacaaagacacctggccctggtgctcaatcagctcttcgtgcccttgctcgttcaggaatgaaaattggtcgtatagaggatgtgactcccattccttcggatagcactcgtagaaagagtggtagaaggggtagaaggctttaaacttcttgtggtatatgtctggagttgctatattttaatttccatgctagacagaattgtggcattttgaaattttgcttaatttaatatcagaacttctattgtaaaaaaaactcactcatacaatagagaccagcttttgcttctttgtgaacatggagatgaggaaatcatgtggcttcttcttgttgctcctcctccttgtctttgcttcccaggtggtggtgcagacggagggaagagtgtgtgagtcacaaagccacgggttccatggtttgtgtaatagagaccacaactgtgctttggtctgcaggaacgaaggtttctccggtggcaggtgcaaaggcttccgccgccgctgcttttgcaccaggatttgttgagatctcatcaaacactactcttgccatgcaaattaataaatcatagctaggccaaataaattgcatctactctttatccatttgggagctagctaccacaaccaactcatacttggtcattggattgcttccctttggcttctgcctttgcttatctctctacctctacgtcttgttcagggtttatgtttcgtaatgattaatgaatgctgtttaattaactagtaaaaaaaaaaaaaaaaaaa

SEQ ID NO: 10550 - protein, 150 aa, Glycine max; identical to SEQ ID NO: 10270
  misc_feature: Ceres CLONE ID no. 1644810
  misc_feature: Ceres CDNA ID no. 35383502
  misc_feature: The plant is abnormally large.
  misc_feature: Useful for making plants with modulated biomass
  misc_feature (28)..(146): Pfam Name: Ribosomal_S11 PFAM Desc: Ribosomal protein S11
  misc_feature: Homolog of GI Number: 2565340 NR Desc: ribosomal protein S14
  misc_feature: Homolog of GI Number: 50905421 NR Desc: putative ribosomal protein S14
  misc_feature: Homolog of GI Number: 28436071 NR Desc: cytoplasmic ribosomal protein S14
  misc_feature: Homolog of GI Number: 50924099 NR Desc: OJ000126_13.9
  misc_feature: Homolog of GI Number: 131772 NR Desc: 40S ribosomal protein S14
  misc_feature: Homolog of GI Number: 21618105 NR Desc: putative ribosomal protein S14
  misc_feature: Homolog of GI Number: 131773 NR Desc: 40S ribosomal protein S14
  misc_feature: Homolog of GI Number: 77745450 NR Desc: ribosomal protein S14
  misc_feature: Homolog of GI Number: 21595448 NR Desc: putative 40S ribosomal protein S14
  misc_feature: Homolog of GI Number: 21593698 NR Desc: 40S ribosomal protein S14
  misc_feature: Useful for decreasing plant size
  misc_feature: Useful for making larger plants
  misc_feature: Useful for making ornamental plants with modified flowers
  misc_feature: Useful for making plants with altered leaf shape eg curled leaves
  misc_feature: Useful for sterility

SEQ ID NO: 10551 - DNA, 774 bp, Glycine max
  misc_feature: Ceres CLONE ID no. 1645546
  misc_feature: Ceres CDNA ID no. 36707565
  CDS (108)..(497): REFERENCED BY SEQ ID NO: 10552
atataaaacacattttgcttgcagcaatctgtttcactccgcatccgcccgcagctgctgcagacaaaaccctagtgagcagagcgtgaaagcaccggccaccggccatgacattcaagcgcaggaatggaggtcgcaacaaacacggccgtggccacgtcaaattcatccgatgctccaactgtggcaaatgctgccccaaggacaaggccatcaagaggtttcttgtgaggaacattgttgaacaggctgcagtcagagatgtgcaggaagcctgtgtctatgaacagtacacgcttccgaaactctatgtgaagatgcagtactgtgtttcctgtgctatccactctcatgttgtgagggttcgatcccgcactgacaggaggaagcgtgaccctccacagcgattcatcaggcgcagggatgatgcacaaaggcccggtcagcctggtcaagcacctcgtcctgctggcacagcagcacctgtccgaacctaaaaacaaatcccaagacaaagccttgatgttatgctgaccaaccatatcctaagaacaaatttgttgctgctttatttttgaacatcagttttgtggaggggtattttattctgattatctactatagtcgttggatagtatctttctggttataatggtggctatttttgaaagtggagcttgatatcatagctttcagcaatttgaaaatgtatctcctgattaagtttttattgaaattatctttttttttttttaaaaaaaaaaaaaaaaaaaa

SEQ ID NO: 10552 - protein, 129 aa, Glycine max
  misc_feature: Ceres CLONE ID no. 1645546
  misc_feature: Ceres CDNA ID no. 36707565
  misc_feature (1)..(120): Pfam Name: Ribosomal_S26e PFAM Desc: Ribosomal protein S26e
  misc_feature: Homolog of GI Number: 5706704 NR Desc: ribosomal protein S26
  misc_feature: Homolog of GI Number: 3885515 NR Desc: similar to ribosomal protein S26
  misc_feature: Homolog of GI Number: 56236112 NR Desc: At2g40510
  misc_feature: Homolog of GI Number: 24111313 NR Desc: At2g40590/T2P4.6
  misc_feature: Homolog of GI Number: 22137298 NR Desc: AT3g56340/F18O21_300
  misc_feature: Homolog of GI Number: 20466414 NR Desc: 40S ribosomal protein S26
  misc_feature: Homolog of GI Number: 56201998 NR Desc: putative ribosomal protein S26
  misc_feature: Homolog of GI Number: 7440567 NR Desc: probable ribosomal protein S31
  misc_feature: Homolog of GI Number: 50931777 NR Desc: putative 40S ribosomal protein S26
  misc_feature: Homolog of GI Number: 61654752 NR Desc: S26
MTFKRRNGGRNKHGRGHVKFIRCSNCGKCCPKDKAIKRFLVRNIVEQAAVRDVQEACVYEQYTLPKLYVKMQYCVSCAIHSHVVRVRSRTDRRKRDPPQRFIRRRDDAQRPGQPGQAPRPAGTAAPVRT

SEQ ID NO: 10553 - DNA, 986 bp, Glycine max
  misc_feature: Ceres CLONE ID no. 1645598
  misc_feature: Ceres CDNA ID no. 40041530
  CDS (150)..(710): REFERENCED BY SEQ ID NO: 10554
aagccctaagcctccagcgccggaggagcagaaagaaaacaaacttccagagttccttcctcagttctctctctttctagaatcttccaattccaaccttattttttcttcaataacaccattaacttactgagtagcgagaacgagtcatggaatccaaacccggtcaaactatcaagctcctctgcagctacggcggcaagattctccctcgcgccaccgacggcgaactccgttacgctggcggccacaccagagtcctcactgtcgcccgttccatttccttttcagaattgatggtgaagctaagcgagttctgtggttcgtctgtgatcttgcggtgtcaattgcccaagggagacttggagaccttgatctccatcaccaacgacgaagatctcgctagcataatcgaagaatacgaccgtgcctcgttgaaattggcgcatccgttgaagatcaaagccgttctatcgccgccgaaatcgtcgaagaagactccgtctgctccgtcgtcggcgtcgtccagcgccagtcactctccgtccagatcgccgcacacctccacagattcgttgccgtacgcggcgtaccaccgcatcggccgccacaaccggccgcctccggcgaaagcttcttgctacacgcagttcgatggaagccctaggtttctgtaccgtggacctcactgcaattattactgccactgaggcgaacgaacgaacgaacgaaccgatttattcacagtaaatacagttgcaagagaatcgctattaccaagtttgattccatacatacgatgatgatgacgacgaaaaatatcaaaggaccaaaatagtagagaaatgagtggactgttaaatacaattaattaatttttttttaattttgataaaattttagaaatggatgagttgaggttctaattaaaaaaaaaaaaaaaaaaaaaaaaaaaaaaaaaaaaaaagaaaaaaaaaaaaaaaaaa

SEQ ID NO: 10554 - protein, 186 aa, Glycine max
  misc_feature: Ceres CLONE ID no. 1645598
  misc_feature: Ceres CDNA ID no. 40041530
  misc_feature (23)..(111): Pfam Name: PB1 PFAM Desc: PB1 domain
  misc_feature: Homolog of GI Number: 62734152 NR Desc: PB1 domain
  misc_feature: Homolog of GI Number: 62734150 NR Desc: PB1 domain
  misc_feature: Homolog of GI Number: 20067163 NR Desc: susceptibility antioxidant protein
  misc_feature: Homolog of GI Number: 2494111 NR Desc: Contains similarity to Glycine protein kinase 6
  misc_feature: Homolog of GI Number: 15219796 NR Desc: protein kinase family protein
  misc_feature: Homolog of GI Number: 51535637 NR Desc: putative ethylene
  misc_feature: Homolog of GI Number: 50508583 NR Desc: putative octicosapeptide/Phox/Bem1p
  misc_feature: Homolog of GI Number: 4835752 NR Desc: Is a member of the PF00069 Eukaryotic protein kinase family. ESTs gbT46484
  misc_feature: Homolog of GI Number: 50933611 NR Desc: contains EST D23238
MESKPGQTIKLLCSYGGKILPRATDGELRYAGGHTRVLTVARSISFSELMVKLSEFCGSSVILRCQLPKGDLETLISITNDEDLASIIEEYDRASLKLAHPLKIKAVLSPPKSSKKTPSAPSSASSSASHSPSRSPHTSTDSLPYAAYHRIGRHNRPPPAKASCYTQFDGSPRFLYRGPHCNYYCH

SEQ ID NO: 10555 - DNA, 886 bp, Glycine max
  misc_feature: Ceres CLONE ID no. 1645651
  misc_feature: Ceres CDNA ID no. 29191795
  CDS (60)..(623): REFERENCED BY SEQ ID NO: 10556
ataaattgcaggtgcagcagcagagagtgcggtaggctcatccgagaccggaagcagcaatggggatcgatctcaaggccggaggtaaaagcaaaaaaaccaaaagaacagcacccaagtccaatgatatctatcttaagctcttggtcaagctttatcgcttccttgttcggagaactggcagcaaattcaatgccgttatactcaagagattgttcatgagcaaggttaacaagcccccattgtctttgtcaaggttgattaagtataccaaggggaaggaagataagattgctgtggtggtgggcaatataaccgatgatattcgtgtttatgaagttccagccttaaaggtcacagcactcaggtttacagagactgctcgggcaagaattgagaaggcaggtggtgaatgcttgacgtttgatcagttggctctcagggctcctctgggacagaacacggtccttcttagaggcccaaagaatgctcgtgaagctgtgaagcactttggtcctgctcctggtgtgcctcacagccacaccaagccttatgttcgagcaaagggaaggaagtttgagagggctagaggaaggaggaacagcagaggatttagggtttgatgtgataaatagtgttctattctctgaaattcaaaatttccttatatcttagacggttgaagcagttttcttgttatttgtgttctgataatatgattttcagtttgaagttgtcattcttggctcctttattctcccagtgaagtaagtgtctgtttgtgctttaactcagttttgatgctagagaattgataatcgttaattacgtgatgcatgcttgttctttatgaaaaaaaaaaaaaaaaaaaaaaaaaaaaaaaaaa

SEQ ID NO: 10556 - protein, 187 aa, Glycine max
  misc_feature: Ceres CLONE ID no. 1645651
  misc_feature: Ceres CDNA ID no. 29191795
  misc_feature (96)..(117): Pfam Name: L15 PFAM Desc: Ribosomal protein L15
  misc_feature: Homolog of GI Number: 6714451 NR Desc: putative 60S ribosomal protein L18
  misc_feature: Homolog of GI Number: 606970 NR Desc: cytoplasmic ribosomal protein L18
  misc_feature: Homolog of GI Number: 23397141 NR Desc: putative 60S ribosomal protein
  misc_feature: Homolog of GI Number: 3021348 NR Desc: ribosomal protein L18
  misc_feature: Homolog of GI Number: 57471708 NR Desc: ribosomal protein L18
  misc_feature: Homolog of GI Number: 34897628 NR Desc: cytoplasmic ribosomal protein L18
  misc_feature: Homolog of GI Number: 50939929 NR Desc: putative cytoplasmic ribosomal protein L18
  misc_feature: Homolog of GI Number: 28798549 NR Desc: 60S ribosomal protein
  misc_feature: Homolog of GI Number: 25295214 NR Desc: 60S ribosomal protein L18
  misc_feature: Homolog of GI Number: 48098918 NR Desc: similar to ribosomal protein L18
MGIDLKAGGKSKKTKRTAPKSNDIYLKLLVKLYRFLVRRTGSKFNAVILKRLFMSKVNKPPLSLSRLIKYTKGKEDKIAVVVGNITDDIRVYEVPALKVTALRFTETARARIEKAGGECLTFDQLALRAPLGQNTVLLRGPKNAREAVKHFGPAPGVPHSHTKPYVRAKGRKFERARGRRNSRGFRV

SEQ ID NO: 10557 - DNA, 1052 bp, Glycine max
  misc_feature: Ceres CLONE ID no. 1645673
  misc_feature: Ceres CDNA ID no. 40041531
  CDS (24)..(851): REFERENCED BY SEQ ID NO: 10558
attgctaagccaattaggtcaacatggaagtcctcagcagccacagtccctcttcgaacgaccccttcgatttcaatcgtgcaaggatttccccctatctcagcgctccttcttctcccaagcgttttggccaattttattacctaagcgccccctcaagcccttctaaagattttgatcttgcggctcacgatgatgatgccttcgcctttttcgttactggggaatccaagagccctcgatccgcggcagagcttttcgacggcggcaaaatcaagccgctgagcgaggatgattcctcggagtctgctaaaagcccacttctccctgccaaacgatcttccatagcccaaggcaagaaggccattcgcgaagccttctcgacgagaaagaagaaagaagagggagatttaagtgaagaagaacaagagacacgagggagagataggactgcgagttctagtagggtcacgcgttctctctctccttgtaacagaatatctcactacacgtgggacgaggaacgcaaccaatcgcagagcaacaaagccgactcgctttctaagacttccaggagatggaggctcactgactttttgctgttccgcagcgcctccgaaggaagaggttccagcaaggaccccttgagaaagttccccactttctacaagaagcccgaagacccaaaagcttccaacccaggcccaaagactaggagaaaggaacccctctccgcgcatgaattgcactacgccagaaagaaagcggaaacagaggatttgaagaagagaacctttttgccatacaaacaggggatcttgggaaggttggctggcttcggatcaaaatgattcatcatcacgtgcttttgcaaccaccgctatcaatccaattccttttttctttgcgtcagcaaattgtattcttttctttaaattttaatatactaccatcttttcttaaaaaaaaaaaaaaaaaaaaaaaaaaaaaaaaaaaaaaaaaaaaaaaaaaaaaaaaaaaaaaaaaaaaaaaaaaaaaaaaaaaaaaaaaaa

SEQ ID NO: 10558 - protein, 275 aa, Glycine max
  misc_feature: Ceres CLONE ID no. 1645673
  misc_feature: Ceres CDNA ID no. 40041531
  misc_feature: Homolog of GI Number: 33111961 NR Desc: pheromone receptor
  misc_feature: Homolog of GI Number: 79323119 NR Desc: AR781
  misc_feature: Homolog of GI Number: 15293109 NR Desc: putative yeast pheromone receptor protein AR781
  misc_feature: Homolog of GI Number: 1669593 NR Desc: AR781
  misc_feature: Homolog of GI Number: 21592890 NR Desc: AR781
  misc_feature: Homolog of GI Number: 76156423 NR Desc: SJCHGC01769 protein
  misc_feature: Homolog of GI Number: 45709115 NR Desc: LOC407686 protein
MEVLSSHSPSSNDPFDFNRARISPYLSAPSSPKRFGQFYYLSAPSSPSKDFDLAAHDDDAFAFFVTGESKSPRSAAELFDGGKIKPLSEDDSSESAKSPLLPAKRSSIAQGKKAIREAFSTRKKKEEGDLSEEEQETRGRDRTASSSRVTRSLSPCNRISHYTWDEERNQSQSNKADSLSKTSRRWRLTDFLLFRSASEGRGSSKDPLRKFPTFYKKPEDPKASNPGPKTRRKEPLSAHELHYARKKAETEDLKKRTFLPYKQGILGRLAGFGSK

SEQ ID NO: 10559 - DNA, 743 bp, Glycine max
  misc_feature: Ceres CLONE ID no. 1645688
  misc_feature: Ceres CDNA ID no. 36707566
  CDS (89)..(487): REFERENCED BY SEQ ID NO: 10560
aactaaacccagaaccctattgttgagcctgattctctcttctctccacgatcgaacaggtttggaagaacacaagaggggttggaaaatggtggtgaggattaggctatcccggttggggtgtaagaacaaacccttctatcgagttatggccgctgatagcagatcaccaagagatggcaaacacctcgaagttctcggttactacaatcccttaccaggtcaagatggtggcaagagaatgggtctcaacttcgacagagtgaagtattggctttctgttggagctcagccttcagagcccgtggagcggcttctatttcgagctggaatgctgcccccaccgcccatggtggcaatggggcgtaaaggtggaccacgtgatactcgccctgtcgatgctcttacaggacgtgtcctgcatcaagagaagccagctgatgccaataacactgagcagcagcatgacactcctgaaaacccttaaagtgatgtattttaggatgtttttccccctttttcatcgaccatttttttctagatatatctttaatatctatgttctcaattgattttacagaactcaatagaataactactgtttgtgtggagaagttgggttcttttgctacattgtgggtgtattttccaaagcgagggctagactctgatcaaatttaggttgttcgatattatgttaagtgaactgataggttatcatccaaaaaaaaaaaaaaaaaaaa

SEQ ID NO: 10560 - protein, 132 aa, Glycine max
  misc_feature: Ceres CLONE ID no. 1645688
  misc_feature: Ceres CDNA ID no. 36707566
  misc_feature (9)..(70): Pfam Name: Ribosomal_S16 PFAM Desc: Ribosomal protein S16
  misc_feature: Homolog of GI Number: 21554119 NR Desc: 30S ribosomal protein S16
  misc_feature: Homolog of GI Number: 16323518 NR Desc: putative 30S ribosomal protein S16
  misc_feature: Homolog of GI Number: 34905148 NR Desc: 30S ribosomal protein S16
  misc_feature: Homolog of GI Number: 23505749 NR Desc: At4g34620/T4L20_200
  misc_feature: Homolog of GI Number: 61100831 NR Desc: ribosomal protein S16
  misc_feature: Homolog of GI Number: 7705626 NR Desc: mitochondrial ribosomal protein S16
  misc_feature: Homolog of GI Number: 61869918 NR Desc:  similar to 28S ribosomal protein S16
  misc_feature: Homolog of GI Number: 73953526 NR Desc:  similar to mitochondrial ribosomal protein S16
  misc_feature: Homolog of GI Number: 23014874 NR Desc: COG0228: Ribosomal protein S16
  misc_feature: Homolog of GI Number: 56551972 NR Desc: ribosomal protein S16
MVVRIRLSRLGCKNKPFYRVMAADSRSPRDGKHLEVLGYYNPLPGQDGGKRMGLNFDRVKYWLSVGAQPSEPVERLLFRAGMLPPPPMVAMGRKGGPRDTRPVDALTGRVLHQEKPADANNTEQQHDTPENP

SEQ ID NO: 10561 - DNA, 792 bp, Glycine max
  misc_feature: Ceres CLONE ID no. 1645813
  misc_feature: Ceres CDNA ID no. 35383503
  CDS (73)..(447): REFERENCED BY SEQ ID NO: 10562
atctcttactccgagatctggtcatcgttgggatctccatacgccggatctgctaaaatacgcttgatccatatgggcctcctcgaccacttgtgggacgacaccgtcgccggcccaaggccggaaaacggtctcggcaagctccgaaaacaccacaccttcactttccgacctagctccggcaaggaaacggagggcgggagcgtgagatcgtacggagacgaatcgtcggaggaagcgacgagagtgacgcgtagtatcatgatcgtgaaaccgcccgggtaccagagtggatcgcctccggtttctcccgccggttctactactccgatttctccgttttccggaggaaaagattcgtttcggtttcgaagaaggtcggcatcagatgcgtacgagaagagagggcagaacagatcaggcccttcttctcctttcgatgtgtgagaaatgagagtcgcattttctcgtacccgaaagctgaggatgtagtcttttggcctatgctgtattcatttttgtttagatctccgtttgcatgtatgaatgtatgtaaggaatgagttgaggttaaggttgtgccacagttctgccagttcacgcgaggtagctttttggtttagcttctttaagtctttacttaggtgagctgcgtagtggctggcaaattgtaagtaagaaagtgtaagggtagagtagcggtgtatcttattattatgtaatgtatatttataattaataagccattctgcgtttgttggtagtgttcaagaaaaaaaaaaaaaaaaaaaa

SEQ ID NO: 10562 - protein, 124 aa, Glycine max
  misc_feature: Ceres CLONE ID no. 1645813
  misc_feature: Ceres CDNA ID no. 35383503
  misc_feature (7)..(119): Pfam Name: Auxin_repressed PFAM Desc: Dormancy/auxin associated protein
  misc_feature: Homolog of GI Number: 21552998 NR Desc: Drm3
  misc_feature: Homolog of GI Number: 2688824 NR Desc: putative auxin
  misc_feature: Homolog of GI Number: 21592368 NR Desc: putative auxin
  misc_feature: Homolog of GI Number: 21553000 NR Desc: Drm4
  misc_feature: Homolog of GI Number: 30696084 NR Desc: dormancy/auxin associated family protein
  misc_feature: Homolog of GI Number: 76161010 NR Desc: Drm3
  misc_feature: Homolog of GI Number: 18476508 NR Desc: ultraviolet
  misc_feature: Homolog of GI Number: 27802109 NR Desc: auxin
  misc_feature: Homolog of GI Number: 15221029 NR Desc: dormancy/auxin associated protein
MGLLDHLWDDTVAGPRPENGLGKLRKHHTFTFRPSSGKETEGGSVRSYGDESSEEATRVTRSIMIVKPPGYQSGSPPVSPAGSTTPISPFSGGKDSFRFRRRSASDAYEKRGQNRSGPSSPFDV

SEQ ID NO: 10563 - DNA, 1609 bp, Glycine max
  misc_feature: Ceres CLONE ID no. 1646013
  misc_feature: Ceres CDNA ID no. 36707298
  CDS (157)..(1389): REFERENCED BY SEQ ID NO: 10564
tcaatggacaactctttcaaacctttgaaatacgaaactccaccgagtgcttctagttctaccaggttagacaatcagcattgcacctaaactctcgctttctccgcttcaacttctcgttctcacgccatcaagtccatatacttcgttccatgcatggagaagataaaaataaaactactcatgaaggatgaaacctttctccaacacccttttgttcttgctgttgttctggttttaggccttgttatgatggacccttttcatctgggtccagtggctgagcatgaattcagacccgtgaagcatagcattgcaccataccaccaagtcatgaaaaattggcctagggacaacatgagcagattagcacttcatgggaaatcagaattcaagaatcaagtctttggaccagagtcactcgagttcgataacatgggtcgtggcccctacactggtttagcggatggacgcgttgttcggtggatgggggagcaacatggttgggaaacatttgcagttgtcacatctaattggacggagaagctttgctttaggggcaatgattcgaccactgagaagcaatggaagcatgagaaaacatgtgggcgtcccctaggcctaagatttgacaaagagagtggagatctatacatagcagacgcatactatggacttcttgtggttggacctaatgggggactcgctacatcgttggcaacccatgttgaaggaaagcccattctcttcgcaaatgatcttgacattcataagaacggatccatcttcttcacagacaccagcaaaagatacaacagagttgcacatttttttatattattggaaggagaagctaccggcaggctcctcagatatgatcctccaactaaaacaacccatgttgtattggatggtcttgtttttcctaacggagtgcaattctctaaagaccactccttccttctctacactgaaaccaccaattgcaggctaatgaagctctggatagagggtcctaaaagtggaactgtggaacttttagctgaccttccggggtttccagacaacgtaagaataaacgaaaaggggcaattctgggtggcaatagactgttgtcgcactccagcacaagaagttcttagtcataatccatggttgaggaacatttacttccgtttgcccataagaatgagcttgttagctagagcgatggggatgaaaatgtacactgtgatttcacttctggacgacaagggagaggttttggaagttcttgaagatcaacagggtcaggtcatgaagctggtcagcgaagtcagagaggagcaagggaagctttggattggaactgtggctcataaccatattgccaccttatcttacccttaattaaaaccttataatttgttatttcgtctatccatttctcttttctcaacctataatgttgtagtatgctgtaattaggattaggattaggattttcctctagtttatcttaaatggtggaattgcattatctctgtttcactctccttgtaaaagtacattatgataatcaataagatagactttataacttccacgccaaaaaaaaaaaaaaaaaaaa

SEQ ID NO: 10564 - protein, 410 aa, Glycine max
  misc_feature: Ceres CLONE ID no. 1646013
  misc_feature: Ceres CDNA ID no. 36707298
  misc_feature (51)..(404): Pfam Name: Str_synth PFAM Desc: Strictosidine synthase
  misc_feature: Homolog of GI Number: 14028757 NR Desc: male fertility protein
  misc_feature: Homolog of GI Number: 34902140 NR Desc: putative male fertility protein
  misc_feature: Homolog of GI Number: 28973541 NR Desc: putative strictosidine synthase
  misc_feature: Homolog of GI Number: 61104883 NR Desc: strictosidine synthase family protein
  misc_feature: Homolog of GI Number: 50918743 NR Desc: putative  strictosidine synthase
  misc_feature: Homolog of GI Number: 13374861 NR Desc: putative strictosidine synthase
  misc_feature: Homolog of GI Number: 62320741 NR Desc: putative strictosidine synthase
  misc_feature: Homolog of GI Number: 42569831 NR Desc: strictosidine synthase family protein
  misc_feature: Homolog of GI Number: 3894193 NR Desc: putative strictosidine synthase
  misc_feature: Homolog of GI Number: 50938179 NR Desc: putative strictosidine synthase
MEKIKIKLLMKDETFLQHPFVLAVVLVLGLVMMDPFHLGPVAEHEFRPVKHSIAPYHQVMKNWPRDNMSRLALHGKSEFKNQVFGPESLEFDNMGRGPYTGLADGRVVRWMGEQHGWETFAVVTSNWTEKLCFRGNDSTTEKQWKHEKTCGRPLGLRFDKESGDLYIADAYYGLLVVGPNGGLATSLATHVEGKPILFANDLDIHKNGSIFFTDTSKRYNRVAHFFILLEGEATGRLLRYDPPTKTTHVVLDGLVFPNGVQFSKDHSFLLYTETTNCRLMKLWIEGPKSGTVELLADLPGFPDNVRINEKGQFWVAIDCCRTPAQEVLSHNPWLRNIYFRLPIRMSLLARAMGMKMYTVISLLDDKGEVLEVLEDQQGQVMKLVSEVREEQGKLWIGTVAHNHIATLSYP

SEQ ID NO: 10565 - DNA, 783 bp, Glycine max
  misc_feature: Ceres CLONE ID no. 1646304
  misc_feature: Ceres CDNA ID no. 25891734
  CDS (56)..(466): REFERENCED BY SEQ ID NO: 10566
attttcgtcttcagtttcagcctttctctcccactcactcactcacaggtaagcaatggcgggaaaaggagggaaggggcttcttgcagcgaaaaccaccgcggcgaacaaggacaaagacaaggacaagaagagacctatttctcgctcttcccgtgctggaatccagtttcctgtgggacgtatccataggcagctgaaacaaagggtccaagccaatggacgtgttggggcaacagctgcagtgtacttagcctcaattctagagtatctgactgctgaagttcttgaacttgctgggaatgcaagcaaggatctgaaggtgaagaggatcacaccaaggcatttgcagctggctatcaggggagatgaggagctggacactcttatcaaagggaccattgctggtggtggtgtcattcctcacattcacaagtccttgatcaacaaaaccgccaaggattgagctctctttggccttctgaattcatgttgccctttactgaaaactaagtttgtggttattgtgaattgatcacagcagtaggctagtacgaggatttgttttaacagttttagaactcaggtggtagtgtgtaaatggcttgcttgctagacaatgctttctttaactgttttagttggtctgtttttagagctttaaccatgttggattgctagacaatgcttgcttttagatacaatctgtgatctgttgttgtctttgttgcccattgaccccttcatatatggttgttttattctaaaaaaaaaaaaaaaaaa

SEQ ID NO: 10566 - protein, 136 aa, Glycine max
  misc_feature: Ceres CLONE ID no. 1646304
  misc_feature: Ceres CDNA ID no. 25891734
  misc_feature (31)..(107): Pfam Name: Histone PFAM Desc: Core histone H2A/H2B/H3/H4
  misc_feature: Homolog of GI Number: 21592838 NR Desc: histone H2A.F/Z
  misc_feature: Homolog of GI Number: 31432099 NR Desc: putative histone H2A
  misc_feature: Homolog of GI Number: 50918585 NR Desc: putative histone H2A protein
  misc_feature: Homolog of GI Number: 62319094 NR Desc: histone H2A
  misc_feature: Homolog of GI Number: 34902610 NR Desc: Putative histone H2A
  misc_feature: Homolog of GI Number: 6319146 NR Desc: H2A protein
  misc_feature: Homolog of GI Number: 30024110 NR Desc: putative histone H2A
  misc_feature: Homolog of GI Number: 21536635 NR Desc: putative histone H2A
  misc_feature: Homolog of GI Number: 16805290 NR Desc: histone H2A variant
  misc_feature: Homolog of GI Number: 56500163 NR Desc: histone H2A variant
  misc_feature: Useful for making ornamental plants with modified flowers
MAGKGGKGLLAAKTTAANKDKDKDKKRPISRSSRAGIQFPVGRIHRQLKQRVQANGRVGATAAVYLASILEYLTAEVLELAGNASKDLKVKRITPRHLQLAIRGDEELDTLIKGTIAGGGVIPHIHKSLINKTAKD

SEQ ID NO: 10567 - DNA, 1033 bp, Glycine max
  misc_feature: Ceres CLONE ID no. 1646378
  misc_feature: Ceres CDNA ID no. 29191621
  CDS (156)..(758): REFERENCED BY SEQ ID NO: 10568
gagagtttcttgttctgtattttttgatttgatcatttcaatcttcaatttttttttatatatccaccaatccgcaaagtgcaaatttctaatctctcacgtattgggttcttctcttttccctcttcgtctccgatcgatccaattctcttcccatggctacgatcggacacaacaatctcaatgccaaattggttcttctcggggacatgggtgctgggaaatccagcctcgttttgcgctttgtcaagggtcaatttctcgaatttcaggaatcaacaataggggcagcgttcttttcacagacgctggcagtaaatgatgcgacagtgaagtttgagatttgggacacagcaggacaagagaggtaccatagcttggctcccatgtattacagaggcgctgctgctgctatcattgtctatgacatcactagctcggactcctttacccgagctaagaagtgggtccaagagcttcaaaaacaagggaatcctaatatggtcatggctcttgctggtaacaaagctgatttggaagacaagaggaaagtgacagctgaagaagcacgtgtatatgctgaagaaaatggtttgtttttcatggagacctctgccaaaactgcatccaacgtgaatgatatattctatgaaatagccaagaggttaccaagggctcagccagctcagaacccagcaggaatggttcttgttgacagacccgccgaaggaactagggctgcatcatgttgttcataagtatttgagctgtatttgcaccccccaatcctttttaattaatcatgttttctttgggttgtatgtactacacactttgatgtcactgttatgtggagctccaacaagtggtatgggctgcaatttacaaaacacaacaacttgatggtgcaaaatatatcctttggatgtgtactttgtcccgtgatttgtttcattgtttgggtatatgaggtgaaaaggcattaatgttaagcttcattcgtatgcttctagacaaaaaaaaaaaaaaaaaa

SEQ ID NO: 10568 - protein, 200 aa, Glycine max; identical to SEQ ID NO: 8014
  misc_feature: Ceres CLONE ID no. 1646378
  misc_feature: Ceres CDNA ID no. 29191621
  misc_feature (1)..(171): Pfam Name: Arf PFAM Desc: ADP
  misc_feature: Homolog of GI Number: 12311684 NR Desc: GTP binding protein
  misc_feature: Homolog of GI Number: 1370178 NR Desc: RAB5A
  misc_feature: Homolog of GI Number: 547478 NR Desc: guanine nucleotide regulatory protein
  misc_feature: Homolog of GI Number: 12311682 NR Desc: GTP binding protein
  misc_feature: Homolog of GI Number: 6010033 NR Desc: GTP binding protein
  misc_feature: Homolog of GI Number: 6010031 NR Desc: GTP binding protein
  misc_feature: Homolog of GI Number: 12311680 NR Desc: GTP binding protein
  misc_feature: Homolog of GI Number: 12311678 NR Desc: GTP binding protein
  misc_feature: Homolog of GI Number: 19691 NR Desc: small GTP binding protein
  misc_feature: Homolog of GI Number: 19986 NR Desc: Nt

SEQ ID NO: 10569 - DNA, 714 bp, Glycine max
  misc_feature: Ceres CLONE ID no. 1646409
  misc_feature: Ceres CDNA ID no. 36707567
  CDS (23)..(478): REFERENCED BY SEQ ID NO: 10570
aactacaatgtgctgcatctgaatgtatggaaaggagactgaattggatcccttttgccgtagatttgaagaggcagctgagcagtttcggttagatgttgcccaaaatccaaatgacactgaagagtccatatggtgctttctgtgtgaagctcaactgtatggagtggatgaagcaaggaagcgatatcttgaggttggcagagacccaaggccagtcatgcgggaagcatataacatgtttaaagatggtggggatcctgaaaagcttgtagctgcattctctggtagcagagaaggtgaatatttttatgcttcattatatgctgggctttattacgaatctcagaacggaacagatgctgctaaagttcatatagttgctgcatgccagtctccttatgggcaaaggtctgatgattatatggcctctcttgccaaggttcactgtcgctgtcgaaattgggtcttcaactaaaacttttttcagtgtgtccattgtgcacgacgaagctcattcataagtttctctatacactactcacagcttcttgtgagttactgtgctactggaacggttaaaagaatttatcatattccttttttccttaaccttttcactttgattttgtggtctatatgaatattagtagactggtagaaagtttttaaacatgagatttcttttaacagtaaaaaaaaaaaaaaaaaaaa

SEQ ID NO: 10570 - protein, 151 aa, Glycine max
  misc_feature: Ceres CLONE ID no. 1646409
  misc_feature: Ceres CDNA ID no. 36707567
  misc_feature: Homolog of GI Number: 34895050 NR Desc: B1045F02.20
  misc_feature: Homolog of GI Number: 23124977 NR Desc: COG0457: FOG: TPR repeat
MYGKETELDPFCRRFEEAAEQFRLDVAQNPNDTEESIWCFLCEAQLYGVDEARKRYLEVGRDPRPVMREAYNMFKDGGDPEKLVAAFSGSREGEYFYASLYAGLYYESQNGTDAAKVHIVAACQSPYGQRSDDYMASLAKVHCRCRNWVFN

SEQ ID NO: 10571 - DNA, 1129 bp, Glycine max
  misc_feature: Ceres CLONE ID no. 1646435
  misc_feature: Ceres CDNA ID no. 40352069
  CDS (70)..(912): REFERENCED BY SEQ ID NO: 10572
atacacgcgtttcgcatgctctagtcacagacaccgacacagatctgtcttccgaagcaggaactaaatatggctgacttgttggaatggtcaaagcaagataagaaacgaatgcttcatgtcgtctaccgtgttggtgaccttgatcgcaccatcaaattttacacagaatgtttaggaatgaagcttttgaggcaaagagatatcccagaggagaaatatgctaatgcttttcttggatttggccctgaagaatcccattttgttgttgaattaacatataattatggggttacctcgtatgacattggcgatggctttggacattttgcaattgcaactcaggacatttataaattggttgagcacatcagggccaagggtggaaacatcacaagggaacctggtccagttcaaggtggaactactgttatcgcctttgttaaggatcctgatggttatacttttggacttatccaaagacctacagtccatgacccattttgtcaagtaatgcttcgtgttggtgatttagagcgctcaattaagttttatgaaaaggctttgggcatgaaggtggtgaggaaggttgataagcctgagtacaagtacactatagctatgctcgggtatggagaggagcacgagacaactgtgttggagttgacatataactatggtgtgactgaatactctaagggaaatgcttatgcacagattgccattggtactgatgatgtatataagagtgctgaggtagttaaccaagtcataaaagaggttggagggaagattactcggcaaccagggccaattcctggccttaatacaaaaaccacttcgtttttagatccagatggatggaaaactgtcttggttgacaacgttgatttcttggaagaactgaagtgaagagcaagctttatatgaaataagtagtcctgctgcttttgtatgaataagttgtctcgcattttatcattgtgcgttttgtatcagtaccagtcatcaacttgttttcttgcttttatgggttcttttgttgacttaaaaccgcaattgaaacctcattctgcatgctacctatgattaatctactagtttatcataaaaaaaaaaaaaaaaaaaa

SEQ ID NO: 10572 - protein, 280 aa, Glycine max
  misc_feature: Ceres CLONE ID no. 1646435
  misc_feature: Ceres CDNA ID no. 40352069
  misc_feature (14)..(135): Pfam Name: Glyoxalase PFAM Desc: Glyoxalase/Bleomycin resistance protein/Dioxygenase superfamily
MADLLEWSKQDKKRMLHVVYRVGDLDRTIKFYTECLGMKLLRQRDIPEEKYANAFLGFGPEESHFVVELTYNYGVTSYDIGDGFGHFAIATQDIYKLVEHIRAKGGNITREPGPVQGGTTVIAFVKDPDGYTFGLIQRPTVHDPFCQVMLRVGDLERSIKFYEKALGMKVVRKVDKPEYKYTIAMLGYGEEHETTVLELTYNYGVTEYSKGNAYAQIAIGTDDVYKSAEVVNQVIKEVGGKITRQPGPIPGLNTKTTSFLDPDGWKTVLVDNVDFLEELK

SEQ ID NO: 10573 - DNA, 697 bp, Glycine max
  misc_feature: Ceres CLONE ID no. 1646651
  misc_feature: Ceres CDNA ID no. 29191622
  CDS (85)..(507): REFERENCED BY SEQ ID NO: 10574
ttctcagttctctcacacactcattcggtgctccgaatctcagattctagggttagggttcccaatttctccaccgatcagaaaatgagttcaactggtggttctaccaagggcggaaggggcaagcccaaagcctccaaatccgtttcaagatcgcagaaagctggtctccaattccccgttggaagaatcgctcgattccttaaggctgggaaatacgccgagcgtgttggtgctggtgctcctgtgtacctctctgcagtgctcgaatatctcgctgctgaggttttggaattggctgggaatgctgctagggataacaagaagaatcgtattgttcctaggcacattcagcttgctgtgaggaacgatgaggaactgagcaagcttttggggtctgttaccattgccaacggaggtgtcttgccgaacattcaccagactctgcttcccaagaaggctggaaaggggaagggcgaaattggatctgcctctcaagagttttagggtttttgttttacccatttggactatagttttgattttattgcgtttgtaacatacatgtttcggttattttctacatgtcttctctgagaaattaggtgcttctcagtctgatgaactggatggtgtattatcacttttgaatcagatgtgaatgtgaagtgctatttggaaaaaaaaaaaaaaaaaa

SEQ ID NO: 10574 - protein, 140 aa, Glycine max
  misc_feature: Ceres CLONE ID no. 1646651
  misc_feature: Ceres CDNA ID no. 29191622
  misc_feature (29)..(93): Pfam Name: CBFD_NFYB_HMF PFAM Desc: Histone
  misc_feature: Homolog of GI Number: 3204129 NR Desc: histone H2A
  misc_feature: Homolog of GI Number: 21553797 NR Desc: histone H2A
  misc_feature: Homolog of GI Number: 20334750 NR Desc: At1g08880/F7G19_24
  misc_feature: Homolog of GI Number: 297871 NR Desc: histone H2A
  misc_feature: Homolog of GI Number: 21593507 NR Desc: putative histone H2A
  misc_feature: Homolog of GI Number: 77555982 NR Desc: histone h2a.
  misc_feature: Homolog of GI Number: 685035 NR Desc: histone H2A homolog
  misc_feature: Homolog of GI Number: 29824201 NR Desc: putative histone H2A
  misc_feature: Homolog of GI Number: 121985 NR Desc: Histone H2A
  misc_feature: Homolog of GI Number: 21593834 NR Desc: histone H2A
MSSTGGSTKGGRGKPKASKSVSRSQKAGLQFPVGRIARFLKAGKYAERVGAGAPVYLSAVLEYLAAEVLELAGNAARDNKKNRIVPRHIQLAVRNDEELSKLLGSVTIANGGVLPNIHQTLLPKKAGKGKGEIGSASQEF

SEQ ID NO: 10575 - DNA, 732 bp, Glycine max
  misc_feature: Ceres CLONE ID no. 1646653
  misc_feature: Ceres CDNA ID no. 25891642
  CDS (3)..(440): REFERENCED BY SEQ ID NO: 10576
attctgcgcaggtagagagagcgagagaacaagaacataagggaaccacagcggcggtaacagaagaacaagcagagaatgggtcgagtgagaacgaagacggtgaagaaatcctctcggcaggtgatagagcgtcactactcgcgcatgaccctggacttccacacgaacaagaagcttctggaggaagtggcgataatcccgtcgaagaggctaaggaacaagatcgcggggttctcgacgcacctgatgaagcgcatccagaagggccctgtgcgcggcatctccctcaagctccagggggaggagcgcgagcgccgcatggacttcgtccccgacgtctccgccatcaacaccgaccacatcgaggtcgacaaggaaaccctcgacatgctccactccctcggtatcaacgacatccccggcatcacccaggttgatcctgtccctgttcagcagaacttccccttcaccaggaggtactgatgatgatggaggctcttctgctttgagaaataagactttgttttatgcttctcgtttcgtgttttcgtggtttttattttattttattttatttctcaagccttttaatttttgttgttgttgctactgctgctgctttagattagaccgagtggaattattattagggtttttggattataagaaatgatataccgttggagtctttgatatattctttttgttgccaaaaaaaaaaaaaaaaaa

SEQ ID NO: 10576 - protein, 135 aa, Glycine max
  misc_feature: Ceres CLONE ID no. 1646653
  misc_feature: Ceres CDNA ID no. 25891642
  misc_feature (2)..(122): Pfam Name: Ribosomal_S17e PFAM Desc: Ribosomal S17
  misc_feature: Homolog of GI Number: 23507769 NR Desc: At5g04800/MUK11_12
  misc_feature: Homolog of GI Number: 76573345 NR Desc: 40S ribosomal protein S17
  misc_feature: Homolog of GI Number: 21595522 NR Desc: 40S ribosomal protein S17
  misc_feature: Homolog of GI Number: 5758304 NR Desc: 40S ribosomal protein S17
  misc_feature: Homolog of GI Number: 21593447 NR Desc: 40S ribosomal protein S17
  misc_feature: Homolog of GI Number: 25295117 NR Desc: 40S ribosomal protein S17
  misc_feature: Homolog of GI Number: 30102846 NR Desc: At2g05220
  misc_feature: Homolog of GI Number: 40287504 NR Desc: 40S ribosomal protein S17
  misc_feature: Homolog of GI Number: 8567795 NR Desc: 40S ribosomal protein S17
  misc_feature: Homolog of GI Number: 50916209 NR Desc: Putative 40S ribosomal protein S17
MGRVRTKTVKKSSRQVIERHYSRMTLDFHTNKKLLEEVAIIPSKRLRNKIAGFSTHLMKRIQKGPVRGISLKLQGEERERRMDFVPDVSAINTDHIEVDKETLDMLHSLGINDIPGITQVDPVPVQQNFPFTRRY

SEQ ID NO: 10577 - DNA, 776 bp, Glycine max
  misc_feature: Ceres CLONE ID no. 1646677
  misc_feature: Ceres CDNA ID no. 36707569
  CDS (304)..(636): REFERENCED BY SEQ ID NO: 10578
attccttttccctctcccattcctactcccaaatcacaattcctcttctttttttctttttctctgagtctcagccatatccatcatctttctctctccgccgcatgcggcggtgacgtttgatacccttcttcttatacagatccgccgccccttcttcctcccaacgccgctttctgctgtggacccggtttatgacgattccttggcaaacaacaaacgcatattgaagaatttgtggtttcacgattttacccctcgaaatcagaagtatcagtagcgtctacgcttgacaaccctacgatgatgagtcagcatccccgtaggaagctgccacgtggcaacccaagaaagggcaagcacgctgaagttgacaagccggctgcgccgaaagctactgagccgccatcctcaaatcggcttctagccggctaccttgcgcacgagttcttgaccaaagggactctgttgggtcagaagtttgagttcgacttgacccgatccggcgtggctgagccaaagagggagcaggataattacaaggaggtggcaaaccttttgaggacaaagggaacccatgtaaagggaattgtgaatcccacccagcttttcaactggattaacaaggtattatgacctggatttttcttttgtgttgtgcctctaaacgcatgaatcaatgatcaattgtattatttgcacagcttagtttgaatttgatttaagtttggggaaaaaaaaaaaaaaaaaaaaaaaaaaaaaaaaaaaaaaaaaaa

SEQ ID NO: 10578 - protein, 110 aa, Glycine max
  misc_feature: Ceres CLONE ID no. 1646677
  misc_feature: Ceres CDNA ID no. 36707569
  misc_feature: Homolog of GI Number: 50926412 NR Desc: OSJNBa0004N05.17
MMSQHPRRKLPRGNPRKGKHAEVDKPAAPKATEPPSSNRLLAGYLAHEFLTKGTLLGQKFEFDLTRSGVAEPKREQDNYKEVANLLRTKGTHVKGIVNPTQLFNWINKVL

SEQ ID NO: 10579 - DNA, 957 bp, Glycine max
  misc_feature: Ceres CLONE ID no. 1646861
  misc_feature: Ceres CDNA ID no. 36707460
  CDS (31)..(657): REFERENCED BY SEQ ID NO: 10580
tttactcactgtgtgatctaatcttcttctatgggttggcttagtcggttcataactgccgtggctttcttagccatcggagtgatattctcaccggagacactggggtcaaaatcaaccacactttccacctacctcaaactcgctcacctcctctgcttctccaccgccttcggcgccgctctgtgggtaacattcatcggcggcatcatcatgtttaaaaatctgccgcggcatcagtttgggaacctgcaaagcaagatgtttccggcgtatttctcgatggtgggtgtctgctgcgccgtatcggtggcttcctttggctaccttcacccgtggaaaacttcctccaccactgagagataccaacttgggtttttgctctcttcctttgcgttcaatcttaccaacttgtttgtctttacacccatgaccattgagatgatgaagcagaggcataaagtggagagagaaaataatataggggaagaagttgggtggtcaaaaaatgtagaagttgcaaagtcaaacccaaagcttgcagccatgaataagaagtttggtatgattcatggattatcttcccttgccaatataatgtcgtttggcagtctagcaatacactcttggtacttggcaggtaaaattgatctctgattcagtttctgcttccaattctatgaaagacaagtgagtttcttgtgaagagatgtataagtgaggatctcagtgttctctctatcttccactttcttgctttattgccaagtaaaaagagtctagaatgtctgtgcaatttatgaaatgtactatctaagtattacagcatattgattggtcaagaaaatcttatgggttgccatggaaacataatgtaatcatcctacctcacatgaataaaataagtagtctctttgagacggtttacattttggatacaaaaaaaaaaaaaaaaaa

SEQ ID NO: 10580 - protein, 208 aa, Glycine max
  misc_feature: Ceres CLONE ID no. 1646861
  misc_feature: Ceres CDNA ID no. 36707460
  misc_feature: Homolog of GI Number: 24111263 NR Desc: At3g62580/T12C14_280
  misc_feature: Homolog of GI Number: 49115646 NR Desc: MGC82565 protein
  misc_feature: Homolog of GI Number: 73986903 NR Desc:  similar to CG32512
  misc_feature: Homolog of GI Number: 31982159 NR Desc: hypothetical LOC235043
  misc_feature: Homolog of GI Number: 7259296 NR Desc: contains transmembrane
  misc_feature: Homolog of GI Number: 61830092 NR Desc:  similar to MBC3205
  misc_feature: Homolog of GI Number: 76621817 NR Desc:  similar to CG32512
  misc_feature: Homolog of GI Number: 66548254 NR Desc:  similar to CG32512
  misc_feature: Homolog of GI Number: 55243817 NR Desc: ENSANGP00000020420
  misc_feature: Homolog of GI Number: 20304097 NR Desc: CG32512
MGWLSRFITAVAFLAIGVIFSPETLGSKSTTLSTYLKLAHLLCFSTAFGAALWVTFIGGIIMFKNLPRHQFGNLQSKMFPAYFSMVGVCCAVSVASFGYLHPWKTSSTTERYQLGFLLSSFAFNLTNLFVFTPMTIEMMKQRHKVERENNIGEEVGWSKNVEVAKSNPKLAAMNKKFGMIHGLSSLANIMSFGSLAIHSWYLAGKIDL

SEQ ID NO: 10581 - DNA, 809 bp, Glycine max
  misc_feature: Ceres CLONE ID no. 1647058
  misc_feature: Ceres CDNA ID no. 36707520
  CDS (7)..(615): REFERENCED BY SEQ ID NO: 10582
agaagaatggcttctcaaagtttgagtttaccaccaacacatattccttacaataggataattgggaagcttgattccaagtttttgttgtggccttcttgtgctcatatcaaacccagaagaatttctacctcaattcgggcaatgggttcctccgcttcttcccactcccagtcacaatatgcagacagcgttgaatctgaagcaggagctgatactattgactataaatctttaaccgatgaagagtggaagaagcggctcacaaatgaacagttctatattactcgtcagaagggaactgaaagagctttcactggggagtactggaatactaaaaccccggggatttaccattgcatatgttgcgacacacctttattcgaatcatctactaagttcaatagtggaactgggtggccatcctattaccagacaattgggaaaaatgtgaaatcaaagttggatttgtcaattattttcatgccgcgccaggaggttctctgtgctgtttgtgatgctcatcttggacatgtgtttgacgatggtcctccacccacgggaaaacgtttctgtatcaatagtgctgcccttaagctcaaaccaaagcagtagacagtgaaatacctacctatcactcggaagcagatggtataatattctaaatatgtgatatactttgtgctgtttttcctatttatggagaacaacaatgaatattgtcttgaactgttgatgtataaaacacaaattttatagaaaaaaaaaaaaaaaaaaaaaaaaaaaaaaaacaaaaaaaaaaaaaaaaa

SEQ ID NO: 10582 - protein, 202 aa, Glycine max
  misc_feature: Ceres CLONE ID no. 1647058
  misc_feature: Ceres CDNA ID no. 36707520
  misc_feature (79)..(201): Pfam Name: SelR PFAM Desc: SelR domain
  misc_feature: Homolog of GI Number: 51090447 NR Desc: putative methionine sulfoxide reductase B
  misc_feature: Homolog of GI Number: 21593253 NR Desc: transcriptional regulator
  misc_feature: Homolog of GI Number: 82411294 NR Desc: Protein
  misc_feature: Homolog of GI Number: 21313208 NR Desc: pilin
  misc_feature: Homolog of GI Number: 76632359 NR Desc:  similar to Methionine
  misc_feature: Homolog of GI Number: 73968713 NR Desc:  similar to methionine
  misc_feature: Homolog of GI Number: 21227736 NR Desc: transcriptional regulator
MASQSLSLPPTHIPYNRIIGKLDSKFLLWPSCAHIKPRRISTSIRAMGSSASSHSQSQYADSVESEAGADTIDYKSLTDEEWKKRLTNEQFYITRQKGTERAFTGEYWNTKTPGIYHCICCDTPLFESSTKFNSGTGWPSYYQTIGKNVKSKLDLSIIFMPRQEVLCAVCDAHLGHVFDDGPPPTGKRFCINSAALKLKPKQ

SEQ ID NO: 10583 - DNA, 681 bp, Glycine max
  misc_feature: Ceres CLONE ID no. 1647121
  misc_feature: Ceres CDNA ID no. 29191387
  CDS (78)..(416): REFERENCED BY SEQ ID NO: 10584
agtggcagacgcagacgccgtgactagacactcatctcactcgcgccatcttagggtttctccttttgtttcgcaacatggttgccgctaagaaaactaagaagacccatgagagcatcaacaacaggctcgctcttgtcatgaagagtggcaaattcaccctcggttacaagaccgttctcaaatctcttaggaactccaaaggaaaattgattatcattgctaacaactgcccccctttgagaaagtcagagattgaatactatgctatgttggcaaaggttggagttcatcattacaatgggaacaatgtggatttgggcactgcatgtggaaaatattacagagtgtgctgccttagcattattgatcctggtgattctgatatcatcaagacactgcctggcgaccagtaaagtagtattgaagttccttgcttgatattttctatttttagttgattccagacattgttgaaagaatatctgattaagttctagactttggtgtaaggtgcatggtttttgggtattctagctgagcatcaagtgtttttgaccttgcaaattttttcatgatgtttcattatgccaatttctatagagatgatataattatagtttgatcacacgcttgctgttaacagcaagcccgtgttatccaaaaaaaaaaaaaaaaaaa

SEQ ID NO: 10584 - protein, 112 aa, Glycine max
  misc_feature: Ceres CLONE ID no. 1647121
  misc_feature: Ceres CDNA ID no. 29191387
  misc_feature (12)..(106): Pfam Name: Ribosomal_L7Ae PFAM Desc: Ribosomal protein L7Ae/L30e/S12e/Gadd45 family
  misc_feature: Homolog of GI Number: 2879811 NR Desc: ribosomal protein L30
  misc_feature: Homolog of GI Number: 6984132 NR Desc: 60S ribosomal protein L30
  misc_feature: Homolog of GI Number: 12322482 NR Desc: 60S ribosomal protein L30
  misc_feature: Homolog of GI Number: 21280849 NR Desc: putative ribosomal protein L30
  misc_feature: Homolog of GI Number: 21593857 NR Desc: 60S ribosomal protein
  misc_feature: Homolog of GI Number: 2668750 NR Desc: ribosomal protein L30
  misc_feature: Homolog of GI Number: 50511371 NR Desc: putative 60S ribosomal protein L30
  misc_feature: Homolog of GI Number: 55297497 NR Desc: putative ribosomal protein L30
  misc_feature: Homolog of GI Number: 71042078 NR Desc: Chain C
  misc_feature: Homolog of GI Number: 34909198 NR Desc: putative 60S ribosomal protein L30
MVAAKKTKKTHESINNRLALVMKSGKFTLGYKTVLKSLRNSKGKLIIIANNCPPLRKSEIEYYAMLAKVGVHHYNGNNVDLGTACGKYYRVCCLSIIDPGDSDIIKTLPGDQ

SEQ ID NO: 10585 - DNA, 924 bp, Glycine max
  misc_feature: Ceres CLONE ID no. 1647152
  misc_feature: Ceres CDNA ID no. 36707570
  CDS (367)..(702): REFERENCED BY SEQ ID NO: 10586
aacacaacacatctgaagttagttctttcgaactactaaatcaaattaaacaatgtcttacattagccttgctcctttggctgtcttcttgcttgccacttcctgtatttaccgttccattcttcaatttttttaatatatctttcatgatttttaattatatattttggaactatgagaaaattataatatatcccaacatatgcatatgcatttatttaaaaaagaaaattatcgacaaatattaagttttaattttattattagataggtttcaaatctataatttctcctgggtgttttctcttcatcaccaattcaaccttatatgcatttgcttttaactttggcctataattttcagtgatgttttcaatgaagaagattgaagcaggaacttgtgcgagatctcagtgttcaaacagcgcacaatgcggctcccattgtgggtgtctcccccgtcccccaattccatatccatttccaattgatactggtctatgcataggtgaacctgcatttgttgccatgattaaggaacatcccaagttatgtcaatctcatgatgaatgcatgaagaaagggagtggcaaattttgcgctcgttatccgaatcctgagagtgagtatggatggtgtattgactctgattctgaagccctaaaaggcttcttgaagatgcctacaacatttgccgagtaacatggtatgcccaatgaaaaagttgcacacaaagatgcgtctactacttcgaataaatgtgtgctccatgcaataagtagtttttgtttccaactcagttggtaatgatggttcatgtttgtttttgagcctacaagtaatttttcttttggatcttgatatccaagtattctttggatatatgaattattaattatagcctaaaaaaaaaaaaaaaaaaaa

SEQ ID NO: 10586 - protein, 111 aa, Glycine max
  misc_feature: Ceres CLONE ID no. 1647152
  misc_feature: Ceres CDNA ID no. 36707570
  misc_feature (1)..(111): Pfam Name: Albumin_I PFAM Desc: Albumin I
  misc_feature: Homolog of GI Number: 4493393 NR Desc: leginsulin
  misc_feature: Homolog of GI Number: 498168 NR Desc: leginsulin precursor
  misc_feature: Homolog of GI Number: 2815007 NR Desc: leginsulin
  misc_feature: Homolog of GI Number: 1658163 NR Desc: leginsulin
  misc_feature: Homolog of GI Number: 11994888 NR Desc: leginsulin
  misc_feature: Homolog of GI Number: 11994886 NR Desc: leginsulin
  misc_feature: Homolog of GI Number: 32328736 NR Desc: albumin 1
  misc_feature: Homolog of GI Number: 32328740 NR Desc: albumin 1
  misc_feature: Homolog of GI Number: 32328734 NR Desc: albumin 1
  misc_feature: Homolog of GI Number: 32328738 NR Desc: albumin 1
MFSMKKIEAGTCARSQCSNSAQCGSHCGCLPRPPIPYPFPIDTGLCIGEPAFVAMIKEHPKLCQSHDECMKKGSGKFCARYPNPESEYGWCIDSDSEALKGFLKMPTTFAE

SEQ ID NO: 10587 - DNA, 727 bp, Glycine max
  misc_feature: Ceres CLONE ID no. 1647188
  misc_feature: Ceres CDNA ID no. 29191475
  CDS (168)..(509): REFERENCED BY SEQ ID NO: 10588
acctcacccagttgcagaaagaaaagaccatcaaagtttcacttcagccttatccggtttagggtttcggtttttgaccctacctttgacgtatcgaaaccttaagtttcggatcaggtctgagcaatctggttggtagaacctttggtcttagagagtcaagttttatgtctgaattagacgatcaaattcctactgccttcgatccttttgctgatgcaaatgctgatgactcgggtgctgggtcaaaggagtatgtgcatattcgggtacagcagcgaaatggtaggaaaagcctgacaaccgttcagggattgaaaaaagaattcagctataacaagatacttaaagatgttaagaaagagttctgttgcaatggaacagttgttcaggacccagaactaggacaggttattcaacttcaaggtgatcagaggaagaatgtttctaccttcctagtccaggctggcatcgtgaagaaggagcatatcaagattcatggtttctgagcggttggagtctcaagtgtcaagtcttacgtgcctgcctatgtgttgggcatatataatctgagttgtgtatgtgattgtggtatttctgatgtgttcttatgttttaccatgtgatgtgggattatggatttcagaacattgtgtgttctttgctttgaagacataatatgaaacagtttaatggacctcgtaaaaaaagaaaaaaaaaaaaaaaa

SEQ ID NO: 10588 - protein, 113 aa, Glycine max
  misc_feature: Ceres CLONE ID no. 1647188
  misc_feature: Ceres CDNA ID no. 29191475
  misc_feature: The plant flowers significantly earllier than wild-type.
  misc_feature: The plant is abnormally small.
  misc_feature: null
  misc_feature: Useful for making plants with modulated biomass
  misc_feature: Useful for making plants with modulated flowering time
  misc_feature (25)..(106): Pfam Name: SUI1 PFAM Desc: Translation initiation factor SUI1
  misc_feature: Homolog of GI Number: 21593860 NR Desc: translation initiation factor
  misc_feature: Homolog of GI Number: 50937977 NR Desc: translational initiation factor eIF1
  misc_feature: Homolog of GI Number: 20218809 NR Desc: putative translation factor
  misc_feature: Homolog of GI Number: 29028784 NR Desc: At5g54760
  misc_feature: Homolog of GI Number: 3334346 NR Desc: Protein translation factor SUI1 homolog
  misc_feature: Homolog of GI Number: 28193048 NR Desc: SUI1 protein
  misc_feature: Homolog of GI Number: 6478142 NR Desc: putative translation initiation factor eIF
  misc_feature: Homolog of GI Number: 6165638 NR Desc: translation initiation factor nps45
  misc_feature: Homolog of GI Number: 2668740 NR Desc: translation initiation factor
  misc_feature: Useful for accelerating flowering time
  misc_feature: Useful for increasing chlorophyll and photosynthetic capacity
MSELDDQIPTAFDPFADANADDSGAGSKEYVHIRVQQRNGRKSLTTVQGLKKEFSYNKILKDVKKEFCCNGTVVQDPELGQVIQLQGDQRKNVSTFLVQAGIVKKEHIKIHGF

SEQ ID NO: 10589 - DNA, 614 bp, Glycine max
  misc_feature: Ceres CLONE ID no. 1647432
  misc_feature: Ceres CDNA ID no. 36707571
  CDS (52)..(345): REFERENCED BY SEQ ID NO: 10590
actgaaaaaagagaaagtgagaaaagggtcgaacaactggtgaagtcattgatggctacagaggaagagagtgcggtgaaggagcctttggatctcattaggctcagcctcgacgagcgtatctatgtcaaactccgttccgacagagagcttcgtggcaaacttcacgcttatgatcagcatcttaatatgattcttggtgatgttgaagaaattgttactacagtggaaatcgatgatgagacatacgaagaaattgtgaggactacaaagcggacagttcctttcctgtttgtcaggggagatggggtgatattggtttccccgccattgaggactgcatgactggactgatgaactatgtgatcattttaataacaagtgtcactgttatgaaattgtataacttaagtagtgatctcatttcatatgattaggttagttactcaattggcctgtgtgctagagatttctgttaaacagtcagttttcaattatctttgtagcatgagagaatcatggtatgcacataaacgattagctgctgtgtggagctgacattatatattagtggctccataaaaagtgtttcacaaaaaaaaaaaaaaaaaaaa

SEQ ID NO: 10590 - protein, 97 aa, Glycine max
  misc_feature: Ceres CLONE ID no. 1647432
  misc_feature: Ceres CDNA ID no. 36707571
  misc_feature (14)..(92): Pfam Name: LSM PFAM Desc: LSM domain
  misc_feature: Homolog of GI Number: 56785201 NR Desc: small nuclear ribonucleoprotein
  misc_feature: Homolog of GI Number: 21592388 NR Desc: Sm
  misc_feature: Homolog of GI Number: 54638535 NR Desc: GA16073
  misc_feature: Homolog of GI Number: 50754429 NR Desc:  similar to U6 snRNA
  misc_feature: Homolog of GI Number: 27712626 NR Desc: similar to U6 snRNA
  misc_feature: Homolog of GI Number: 55233815 NR Desc: ENSANGP00000011793
  misc_feature: Homolog of GI Number: 24649486 NR Desc: CG31184
  misc_feature: Homolog of GI Number: 25012398 NR Desc: RE11655p
  misc_feature: Homolog of GI Number: 61819037 NR Desc:  similar to LSM3 homolog
  misc_feature: Homolog of GI Number: 34908592 NR Desc: P0505D12.24
MATEEESAVKEPLDLIRLSLDERIYVKLRSDRELRGKLHAYDQHLNMILGDVEEIVTTVEIDDETYEEIVRTTKRTVPFLFVRGDGVILVSPPLRTA

SEQ ID NO: 10591 - DNA, 1170 bp, Glycine max
  misc_feature: Ceres CLONE ID no. 1647675
  misc_feature: Ceres CDNA ID no. 36707273
  CDS (190)..(894): REFERENCED BY SEQ ID NO: 10592
aactcgctcagactcattaccagttttctttccagaaatatctttaggcaagtaatccccgttcggccgcttcaaaatcttcaccctctcccctctgttggcctgcgttttcctcacctcgggctgaaactgcatttccgacgccggaggaggctcacacatttccggcaacggtggatcctgcgaaacatgaaccactggcggcggagattcagccacgaccacaacacgcggcggcgaatgaggaggacctgtaggaagaggcacgcattgctccatcatcggtccaccaggagtctcaaaaacacgtctctcctcaacaaccaccactcccggtggcggcttgttttgctccgttctctcaccttgctcctgctgctgctgctgcggcggcggcggcggcggcggaggtttatcctcttccatgagcatctcgtcgtagtaataaatcctgaggccaatttctcctcttatccaactgaacacgcttctcttctccagcgtgtagtaaacaagagcttcttctcctcttctggaaaactgagttccgtagagcttgaccctcccgaggaagtggttcttgcggccgcttccgttgccgaacttcttgtcgttgtagacctccacttcgagctcctcgaactccatgttctccgggtcggagacgatgaactcgagaggctcgttccataccgggttcagctccttgaaccgggtcgaggttcgcttcctctgaccgtcgaagtccgccaccacgtaagggctcgagctgccttggccatctttggggagcaggttgcgcgcgtccaccacttccaccaccagtctccgtacggtttggggcggttgctgaaacggcgtcgtcatcatcttctcattgcggaatgtggataaacaaactcgcgctgtgtatgccgttgatagcggtcactcactgtgatcaacgtttcacagagagaggctgcaagccatgtttgtgacattataacacgtgacttaggaccagtgtcatgaaataagggatttcttattccataagtcaatgcaaatggtaagtttgggagatttatggtcaattctcacaattattttcaccgtgtttgcaatgttctaaggccccttcaatgatagaatgcacattttctctttcaaaaaaaaaaaaaaaaaaaa

SEQ ID NO: 10592 - protein, 234 aa, Glycine max
  misc_feature: Ceres CLONE ID no. 1647675
  misc_feature: Ceres CDNA ID no. 36707273
MNHWRRRFSHDHNTRRRMRRTCRKRHALLHHRSTRSLKNTSLLNNHHSRWRLVLLRSLTLLLLLLLRRRRRRRRFILFHEHLVVVINPEANFSSYPTEHASLLQRVVNKSFFSSSGKLSSVELDPPEEVVLAAASVAELLVVVDLHFELLELHVLRVGDDELERLVPYRVQLLEPGRGSLPLTVEVRHHVRARAALAIFGEQVARVHHFHHQSPYGLGRLLKRRRHHLLIAECG

SEQ ID NO: 10593 - DNA, 1588 bp, Glycine max
  misc_feature: Ceres CLONE ID no. 1647706
  misc_feature: Ceres CDNA ID no. 40041532
  CDS (18)..(1352): REFERENCED BY SEQ ID NO: 10594
accatggaaggaagcatatgttcatctttcagtttctcctcctccttcctcctactctccgttgcttttcaaaattccccttcccccaaacggcgtcgtctctaacaagagctttctcacaaagcacctccatgtccataaaccttcactctcacgccttctccggcaaccctctgctctccaaattcccactccccggcaaccccctttcgccctctgcagctctcgaagctctcaacgcgcgaattagcctaaacaacactcactcttctccctccccgagcttcaaggtgctgcctttcagaaatgggaggcccttggcttcttcatcggccggtaccggcgactcgccgccgatttgggatctgggttggctcggcttggacgatctcaggggtattttcgagaattcaggtgcccagttgagcgtggacttgttggtgtatctgaattcgagttcagaggacgacgccgtttactgggcaatcgatgtttctgataaagtacctgaattgggtagcaacaacgcggcggggttgtgttttgtggagcttcgaacgctcatggtggctacagactggtcggatttgcaactgatgggaaacttggctattgctggtcatgctaaggcactgctggaatggcataatttttcacgattttgtggccattgtggagagaaaacagtcccaatggaagctgggagacggaagaaatgttcaaatgattcatgcaagaagaggatatatccacgtgttgacccagtggtcattatgctcgttattgatagagagaatgaccgtgctctattggctaaacgaccgatgcgtatagctcgattgtatacctgcttatcaggtttcacagagccaggagaaagcttggaggaagctgtaagaagagaaacatgggaagagactggtattgaagtgggagaagttgtttaccacagttctcagccatggcctgttgcaccaaatagcattccatgtcagctgatggttgggttctttgcatatgcaaaatcccttgaaataactgtggacaagacagagttagaagatgctcagtggttcagtagagaagatgtaagaaaagcattgacgtttgctaaatacaagcaagcccaaagaactgcagcagagaaggttgagcaaatgtgtaagggactagaaaagaatcgaagcttggcttcagatctcaatgtggagagtgctgatgaacaacacgcttcaatagttgttcctggaccctttgcgatagcctatcaccttatttcttcttgggccttctcagatcaaaatgtagtaaatggtgttgaatgcaattcaaaaaacccatcggatctatgacaaattcgtacattttctttttcaaggaatctctggagataaaaattatgttgttagtgttatatatctctttcatctccaataatgtgaaggggttctgtgccagtgatggaattttcccatcaacttttgattttgcattattcattcatgtacaactcaaattctttattaacaacaaacttataaatattatgcaagaccatctgctttctgtaaaaaaaaaaaaaaaaaaa

SEQ ID NO: 10594 - protein, 406 aa, Glycine max
  misc_feature: Ceres CLONE ID no. 1647706
  misc_feature: Ceres CDNA ID no. 40041532
  misc_feature (210)..(339): Pfam Name: NUDIX PFAM Desc: NUDIX domain
  misc_feature: Homolog of GI Number: 19699164 NR Desc: AT5g20070/F28I16_220
  misc_feature: Homolog of GI Number: 55775382 NR Desc: MutT/nudix protein
  misc_feature: Homolog of GI Number: 79039991 NR Desc: mutT/nudix family protein
  misc_feature: Homolog of GI Number: 48763670 NR Desc: COG2816: NTP pyrophosphohydrolases containing a Zn
  misc_feature: Homolog of GI Number: 68193106 NR Desc: NUDIX hydrolase
  misc_feature: Homolog of GI Number: 77360858 NR Desc: putative NTP pyrophosphatase
  misc_feature: Homolog of GI Number: 15887452 NR Desc: AGR_C_150p
  misc_feature: Homolog of GI Number: 71545869 NR Desc: NUDIX hydrolase
  misc_feature: Homolog of GI Number: 48783985 NR Desc: COG2816: NTP pyrophosphohydrolases containing a Zn
MSINLHSHAFSGNPLLSKFPLPGNPLSPSAALEALNARISLNNTHSSPSPSFKVLPFRNGRPLASSSAGTGDSPPIWDLGWLGLDDLRGIFENSGAQLSVDLLVYLNSSSEDDAVYWAIDVSDKVPELGSNNAAGLCFVELRTLMVATDWSDLQLMGNLAIAGHAKALLEWHNFSRFCGHCGEKTVPMEAGRRKKCSNDSCKKRIYPRVDPVVIMLVIDRENDRALLAKRPMRIARLYTCLSGFTEPGESLEEAVRRETWEETGIEVGEVVYHSSQPWPVAPNSIPCQLMVGFFAYAKSLEITVDKTELEDAQWFSREDVRKALTFAKYKQAQRTAAEKVEQMCKGLEKNRSLASDLNVESADEQHASIVVPGPFAIAYHLISSWAFSDQNVVNGVECNSKNPSDL

SEQ ID NO: 10595 - DNA, 1577 bp, Glycine max
  misc_feature: Ceres CLONE ID no. 1648235
  misc_feature: Ceres CDNA ID no. 25892477
  CDS (147)..(1397): REFERENCED BY SEQ ID NO: 10596
aagttgggagctgagggtcaaaagcagttcattgttcagaggaagatagacatacacttcttcaaagagctagggtttttgtccctccctctcaaaattcattaattgaaaagagaaagaaaaaaaaaagaaaaaaacttcttcaaatgttcccttacagttccaacccctacccttccttcccttcatcatcttcttcttcataccctccttttccttttctcaaccttgagaatgcttctgcaagcaacacccttcttcatgatccactttctgtgccttacataccaactcatcatcataacccttcaagcatccaagaagcactgaacaatttgccagtcacagatcataactgtggcggtggtggtggttctgcaatgaccaaacctgactctaatggtggtggtgctcctcactatggcatttcttgtttcctcacaaagaagccacctaagaaagacaggcacagcaagatttacacctctcagggcttgagggaccgaagggtgaggttgtccattgcgattgctcgcaagttctttgatcttcaagacatgctagggtttgacaaagccagtaacacccttgagtggctcttcaacaagtccaagagagcaattaaggagcttgcaaggagcaagcacagcaacaacaacagtgatgaaggagccaagagcttctcttcttcatctgattgtgacgatgactgtgaagtggtttctgagatcaagcagaaacaacaacaactcatcacttgtgatgctgctactactcaacacaacctgcaacaagggttggattcaggtgataacaagtcaccaacaacattggtggctgcaagggagagtatgaagttgaagaggacacagaaggaacctgcaaagataaaggagtcaagggagaaagcaagagcaagagcaagggaaaggactagtaacaagattattatgtgcaatgttaacaccaacaacaacaacacaggaaggagggtgcaacaacaagacttgaagaaaaagtgccctgcaattgaaaacaaccattctcaaatcatgcatcaatcaagttcatcacctactcacaaccttgtgggaaatgaaacacctagagatgacttcaacgttatcgaggaatccattgtgatcaagagaaagttgaagccatctttgatgtcctcttctcatcatcatcatcatcatcaccaaagccttatgatccctaaggaaccaccaagcttcaacaactgtgagtaccaccccttctccaatttgtctccaaattgggatgctaatggatccactggccgctccaacttctgtgccgtagctagcatgaatctatccacagggcttcaaatctttggaaagtcttgggaggagtgcatcaatccacgttaatttacactagtgtgtgtgtgtgtgttagcttttcccttgtctttttcatcttttttttttttcagtatcatctgattgaatgaaactcttgtagtggtttgccaaggaatcatttgaaggcatctttctgtgttttccaccagaaactttttctgtccttaaaaaaaaaaaaaaaaaaaa

SEQ ID NO: 10596 - protein, 416 aa, Glycine max
  misc_feature: Ceres CLONE ID no. 1648235
  misc_feature: Ceres CDNA ID no. 25892477
  misc_feature (93)..(340): Pfam Name: TCP PFAM Desc: TCP family transcription factor
  misc_feature: Homolog of GI Number: 38112246 NR Desc: CYCLOIDEA
  misc_feature: Homolog of GI Number: 38112210 NR Desc: CYCLOIDEA
  misc_feature: Homolog of GI Number: 38112244 NR Desc: CYCLOIDEA
  misc_feature: Homolog of GI Number: 38112222 NR Desc: CYCLOIDEA
  misc_feature: Homolog of GI Number: 38112212 NR Desc: CYCLOIDEA
  misc_feature: Homolog of GI Number: 38112206 NR Desc: CYCLOIDEA
  misc_feature: Homolog of GI Number: 38112214 NR Desc: CYCLOIDEA
  misc_feature: Homolog of GI Number: 38112208 NR Desc: CYCLOIDEA
  misc_feature: Homolog of GI Number: 38112216 NR Desc: CYCLOIDEA
  misc_feature: Homolog of GI Number: 38112226 NR Desc: CYCLOIDEA
MFPYSSNPYPSFPSSSSSSYPPFPFLNLENASASNTLLHDPLSVPYIPTHHHNPSSIQEALNNLPVTDHNCGGGGGSAMTKPDSNGGGAPHYGISCFLTKKPPKKDRHSKIYTSQGLRDRRVRLSIAIARKFFDLQDMLGFDKASNTLEWLFNKSKRAIKELARSKHSNNNSDEGAKSFSSSSDCDDDCEVVSEIKQKQQQLITCDAATTQHNLQQGLDSGDNKSPTTLVAARESMKLKRTQKEPAKIKESREKARARARERTSNKIIMCNVNTNNNNTGRRVQQQDLKKKCPAIENNHSQIMHQSSSSPTHNLVGNETPRDDFNVIEESIVIKRKLKPSLMSSSHHHHHHHQSLMIPKEPPSFNNCEYHPFSNLSPNWDANGSTGRSNFCAVASMNLSTGLQIFGKSWEECINPR

SEQ ID NO: 10597 - DNA, 1494 bp, Glycine max
  misc_feature: Ceres CLONE ID no. 1648323
  misc_feature: Ceres CDNA ID no. 25892406
  CDS (285)..(1247): REFERENCED BY SEQ ID NO: 10598
atagtgcttcttttttttgctaccctcccaagttaccatcattcctctttcttgtttttgttttcgttttttaaccaaaaagtttcaaacacactgcaagtgggtcttccctcttttttttttttttttcttcacacttatttttgaaactcattgcttccaaaccagagaagaaaaaaaaaatgaatactttgagctccctctacatgtttcgatccaacccattattcataaatgacattctggttataaagcctcagaagaaatcaccactgttgttaaggatgtcggtgttgatcttctcaatggtgtgtggtgttttcatttgttccgtgtgtctaaagcagataagcactcatgcaaggactatgcttatggagttgcaaattgagaagccttctcggagtagtagtagtagattgaacctaaaaaatgatgttcctttgttacattaccccaagcctgtgtctttcaacaggagtgagtgtgctggtaaccctgtgcggttctttgccattttgtcgaatcagagatctggcagtgggtggtttgagacccttttgaatagccatattaatgtgagctccaatggggagattttttcagttagagaaagaagagtaaatgtttctaccattgtacagactttggacaaagtttacaacctggactggctcagcagtgcttccaagaatgaatgctcagctgcaattggatttaagtggatgcttaatcaggggctaatggagcaccctaaggaaatagcagattacttcaacagtagaagtgtttctgtcatatttcttttccgaagaaacttattacggagaatggtatcaatgcttgccaactcttatgatcgttatgctaagctattgagtggaactcataagtctcatgttcattctacagaagaggctgatactctttcaaagtacaagcctaccattaattctacatcattgctggctgatttgaaggatatagaaatgagaactgcaaaggtgttggaatacttcaacaccactcggcatatgatcctgtactatgaggatcttatgcgaaattgtactaagctaaaagatgtgcaagagtttttaggattgccacagatggaattaacaagccgtcaggttaagatacacagaggaccattgtcagatcacattaaaaattgggatgatgtgaacaggacactaacaggaactgtttatgagagtttcctccacgccgattattcatcttaacctctaactcctggaaaggtgtaaatatcaacactgattttgtcccgggaaatagtttgaagttttggtgctggttgcggtaagaacactgtctctgcattccgatatttcttttcactccattgatgagatgtatgtttctttgtaatctttttatttttgtgcattcttgaatgactttgtatattcccagctaatttattagtaaagatgagcattggttttattcaaaaaaaaaaaaaaaaaa

SEQ ID NO: 10598 - protein, 346 aa, Glycine max
  misc_feature: Ceres CLONE ID no. 1648323
  misc_feature: Ceres CDNA ID no. 25892406
  misc_feature: Homolog of GI Number: 45773806 NR Desc: At3g50620
  misc_feature: Homolog of GI Number: 45752690 NR Desc: At2g15730
MFRSNPLFINDILVIKPQKKSPLLLRMSVLIFSMVCGVFICSVCLKQISTHARTMLMELQIEKPSRSSSSRLNLKNDVPLLHYPKPVSFNRSECAGNPVRFFAILSNQRSGSGWFETLLNSHINVSSNGEIFSVRERRVNVSTIVQTLDKVYNLDWLSSASKNECSAAIGFKWMLNQGLMEHPKEIADYFNSRSVSVIFLFRRNLLRRMVSMLANSYDRYAKLLSGTHKSHVHSTEEADTLSKYKPTINSTSLLADLKDIEMRTAKVLEYFNTTRHMILYYEDLMRNCTKLKDVQEFLGLPQMELTSRQVKIHRGPLSDHIKNWDDVNRTLTGTVYESFLHADYSS

SEQ ID NO: 10599 - DNA, 1127 bp, Glycine max
  misc_feature: Ceres CLONE ID no. 1649825
  misc_feature: Ceres CDNA ID no. 40041533
  CDS (8)..(964): REFERENCED BY SEQ ID NO: 10600
actcaaaatggcgaccaactcacgaccgctgtctactggctctgcgcgccaatcaaagctccgcattggcttcattccagaacacttctccactccgatcgcattcgcacaacaacactacggtctcgatgctgaactcatacctgtgccgacggggaccggcgacctcaccaagcgcttgaagacctccgacgaatctgagaagctcgacgtggccattggcctgaccgagggtttcgtcgcagacctgggaaagagccgcgctgcagcgcaagagcctggatatggtctcgtgggaacatacgtggagtcgccgctgcggtgggcgatctccactggcaaagagagggcggacatcaatggtgtgagcgatctcaagggcaagagggccggcgtcagcaggattggcagtggttcgtacgtcatggcatacgtgcttgctgaccagcaaggctggctctcccctggtacaaaggaagagcccttcgatgtggtaccatccggagcctttggcccgctacgcacggcagtacgtcaggaacccacgactgcggatttcttcatgtgggagcacttcactaccaagttctactttgacaatggcgagctcaagcgcattggcgagatctacacaccctggccgagctggatgattgctgcgcgtgatcccacagatccggcactgcagacaatggctgagaagctaaacgccggcgtgcaacactatctggaccacgaagacgaggctgtgaagcacatcacctcaaccatggagtattccgaggaggacgcgaaggagtggatgaagaccgtgcagttcacaaaggatacacgtggtgtagacaccgctgtggtagagaagacggtcggaattttgaagaaggctggtgttcttgacgaaaaggcaggaaacgggcctgatctagtcgcggtgaagagggccgagaaagcagcgaccgcttagcgagtgctatgcactctcaatggtcttacactggcgatctttggacggagcgttgtacctgagcatatccacgggtactgacagcagagctgaaatgaacatacgcctaatagaaggccacgccggtcaaaactgcaaaaaaaaaaaaaaaaaaaaaaaaaaa

SEQ ID NO: 10600 - protein, 318 aa, Glycine max
  misc_feature: Ceres CLONE ID no. 1649825
  misc_feature: Ceres CDNA ID no. 40041533
  misc_feature: Homolog of GI Number: 32415932 NR Desc: predicted protein
  misc_feature: Homolog of GI Number: 45185955 NR Desc: ACR269Cp
  misc_feature: Homolog of GI Number: 68483802 NR Desc: putative thiamine biosynthesis enzyme
MATNSRPLSTGSARQSKLRIGFIPEHFSTPIAFAQQHYGLDAELIPVPTGTGDLTKRLKTSDESEKLDVAIGLTEGFVADLGKSRAAAQEPGYGLVGTYVESPLRWAISTGKERADINGVSDLKGKRAGVSRIGSGSYVMAYVLADQQGWLSPGTKEEPFDVVPSGAFGPLRTAVRQEPTTADFFMWEHFTTKFYFDNGELKRIGEIYTPWPSWMIAARDPTDPALQTMAEKLNAGVQHYLDHEDEAVKHITSTMEYSEEDAKEWMKTVQFTKDTRGVDTAVVEKTVGILKKAGVLDEKAGNGPDLVAVKRAEKAATA

SEQ ID NO: 10601 - DNA, 1233 bp, Glycine max
  misc_feature: Ceres CLONE ID no. 1650375
  misc_feature: Ceres CDNA ID no. 40041534
  CDS (58)..(924): REFERENCED BY SEQ ID NO: 10602
aaaaccacatcattttcgccactctctctctctctctgatatccaaataatccaaaaatggtatcaaaggtgaagagaagcccagtgaagtccatcaaggacctccgcaacaacaacaaccgtcgctggcgacggaaaacccccataaaaaatgtggtggcggcttcctccgccgcgctggccaccatccgccgccgtatcacgaaactcttctcgaagatcgcgcgcctcagcaccagcgcccacaagaaaaaagcaacctcgtacaaaatcctcaaaaagacaacaacaaccgacgaagaactcgacaacattcgccgaaccctcgtgttcgacgacaccaccgccaccaccaccaccccgctcctccctccgttgttctccgtccgaaaaacggtgttcctcgacctcgacgaaacgctcgtccactcgcacccctcgccgccgccggagcgcttcgacttcgtcgtccggccggtcatcgacggcgagcccatggatttctacgtcctgaagcgccccggcgtcgacgagttcctcgagtccctcgccgccaagtacgaggttgtcgttttcaccgcggcgcttaaggagtacgcctccatggtcctggaccggctcgaccggaaccggttcatctcgcaccggctctaccgcgactcgtgccgaaacattgacgggaagctcgtgaaggaccttaacgaaacgggtcgcgacctcaaacgggtcgttatcgtcgacgataacccgaattcgttcgcgaaccaacccgagaacgcgattctgataaggcccttcgtggacgatattctcgaccgggagctttggaaattgagaagcttttttaatgggtcggattgctgtgaatgtgatgatatgagggatgctgttaagcactacgtcactgtgcagcatcgacgttagattgttagattctttttattattttttttttcatgatttatgtctttacttcccctcgtgagttgaacaatcaacaatgagttgtttgttcaatgcctggttgtgagtagggagggaaaatgctgcttattactaattctttagattgaataatcaactttgatttaattgatgtatctaatgatggtatgtgtcaaatggatagcacacttccattcagacatgatgtatgttaaggattaagtttgttaagttgcagcaaaaaaaaaaaaaaaaaaaaaaaaaaaagaaaaaaaaaaaaaaaaaaaa

SEQ ID NO: 10602 - protein, 288 aa, Glycine max
  misc_feature: Ceres CLONE ID no. 1650375
  misc_feature: Ceres CDNA ID no. 40041534
  misc_feature (103)..(280): Pfam Name: NIF PFAM Desc: NLI interacting factor
  misc_feature: Homolog of GI Number: 48310461 NR Desc: At1g29770
  misc_feature: Homolog of GI Number: 15220552 NR Desc: NLI interacting factor
  misc_feature: Homolog of GI Number: 60462033 NR Desc: development protein DG1148
  misc_feature: Homolog of GI Number: 24664944 NR Desc: CG5830
  misc_feature: Homolog of GI Number: 54641770 NR Desc: GA19163
  misc_feature: Homolog of GI Number: 33589372 NR Desc: RE52350p
  misc_feature: Homolog of GI Number: 66521481 NR Desc:  similar to CG5830
  misc_feature: Homolog of GI Number: 6323047 NR Desc: Functionally redundant Psr1p homolog
  misc_feature: Homolog of GI Number: 32396218 NR Desc: NIF
  misc_feature: Homolog of GI Number: 51013613 NR Desc: YLR019W
MVSKVKRSPVKSIKDLRNNNNRRWRRKTPIKNVVAASSAALATIRRRITKLFSKIARLSTSAHKKKATSYKILKKTTTTDEELDNIRRTLVFDDTTATTTTPLLPPLFSVRKTVFLDLDETLVHSHPSPPPERFDFVVRPVIDGEPMDFYVLKRPGVDEFLESLAAKYEVVVFTAALKEYASMVLDRLDRNRFISHRLYRDSCRNIDGKLVKDLNETGRDLKRVVIVDDNPNSFANQPENAILIRPFVDDILDRELWKLRSFFNGSDCCECDDMRDAVKHYVTVQHRR

SEQ ID NO: 10603 - DNA, 780 bp, Glycine max
  misc_feature: Ceres CLONE ID no. 1650544
  misc_feature: Ceres CDNA ID no. 29191358
  CDS (141)..(482): REFERENCED BY SEQ ID NO: 10604
atttctctcacttttttcgttacttaattccttcgttcatcacttctactttctttcttttcctctcgcaagtcttagtgcttggcgattgattaccccagaaggactttgtttgttacaagaaaccaagggcaagtttcatgtctgaattcgacacaaacatcccaactgcttttgatccctttgctgatgcaaatgctgaggactcaggtgctgggacgaaagagtatgttcatgttcgtgtacaacagcgcaacggaaggaaaagcctaacaactgttcaaggtttaaagaaagagtacagctatagcaagatactcaaggacctcaagaaagaattctgctgtaatggtactgttgtccaagaccctgagttgggccaggtcatacaacttcagggtgatcaaagaaagaatgtttctactttccttatgcaggctggcatagtaaagaaggaatacatcaagcttcatggtttctaaggcctaaccaaaagtggcaatttagcttcatgctaaaatacatatagcctgctgattacatttaatagcaacagcagcaacagcttataaatctgaatccaagcaattatcagtcacagcaacattctgttatattgtagttaaaagagtcgtatataatctgctgtggtactgtttttttacctattctagatagttactacttgataatatatggtaaggataatatgtctgcttctaagacacctgtgttgaataaatttgtgttattattcttccaaaaaaaaaaaaaaaaaaa

SEQ ID NO: 10604 - protein, 113 aa, Glycine max
  misc_feature: Ceres CLONE ID no. 1650544
  misc_feature: Ceres CDNA ID no. 29191358
  misc_feature: The plant flowers significantly earllier than wild-type.
  misc_feature: The plant is abnormally small.
  misc_feature: null
  misc_feature: Useful for making plants with modulated biomass
  misc_feature: Useful for making plants with modulated flowering time
  misc_feature (25)..(106): Pfam Name: SUI1 PFAM Desc: Translation initiation factor SUI1
  misc_feature: Homolog of GI Number: 3334346 NR Desc: Protein translation factor SUI1 homolog
  misc_feature: Homolog of GI Number: 21593860 NR Desc: translation initiation factor
  misc_feature: Homolog of GI Number: 29028784 NR Desc: At5g54760
  misc_feature: Homolog of GI Number: 4585973 NR Desc: translation initiation factor
  misc_feature: Homolog of GI Number: 6165638 NR Desc: translation initiation factor nps45
  misc_feature: Homolog of GI Number: 20218809 NR Desc: putative translation factor
  misc_feature: Homolog of GI Number: 53791638 NR Desc: putative translation initiation factor
  misc_feature: Homolog of GI Number: 28193048 NR Desc: SUI1 protein
  misc_feature: Homolog of GI Number: 2668740 NR Desc: translation initiation factor
  misc_feature: Homolog of GI Number: 50937977 NR Desc: translational initiation factor eIF1
  misc_feature: Useful for accelerating flowering time
  misc_feature: Useful for increasing chlorophyll and photosynthetic capacity
MSEFDTNIPTAFDPFADANAEDSGAGTKEYVHVRVQQRNGRKSLTTVQGLKKEYSYSKILKDLKKEFCCNGTVVQDPELGQVIQLQGDQRKNVSTFLMQAGIVKKEYIKLHGF

SEQ ID NO: 10605 - DNA, 702 bp, Glycine max
  misc_feature: Ceres CLONE ID no. 1650602
  misc_feature: Ceres CDNA ID no. 35383505
  CDS (88)..(501): REFERENCED BY SEQ ID NO: 10606
aaagcactagcatttgcaaacacacaaccctctcctctcctaatccataaaaactatctttcatttggcctcgagtagaagagaaagatgagtgtagaaattttggatggtgccaccattgtcaacttccttcaggatgaagaagcattcagtgcctcagttcttaaccggttcgcctaccttgacacagacaatgatggccttctctcgtatgcggagatgttgaaggagctccaaagcttgagggtgttggaaacgcactttggtattgatgtggagccagacccagatgagcttgctcgtgtttatgaatccttgttcgtacaattcgatcacaacttgaatggcaccattgatctcgacgaattcaagaaggaaacgaagcagatgatgcttgccatggcaaatggattgggcttcttgccggttcagatggtcttggaagaagacagcatcctcaaaaaagctgttgaaagggagttcccaaaagtggcttcttaagtactaatttactcaagcctgtaattcaaaaagttctagtattgtaatatttttaatgtcctgttttatattactgtttccagtataacgacttacactggcttttttgtaataaattcctcatggtcgtgaactgatcttaatgactttttacacatccataaaggaaaaattacacctgaaaaaaaaaaaaaaaaaaaa

SEQ ID NO: 10606 - protein, 137 aa, Glycine max
  misc_feature: Ceres CLONE ID no. 1650602
  misc_feature: Ceres CDNA ID no. 35383505
  misc_feature (24)..(52): Pfam Name: efhand PFAM Desc: EF hand
  misc_feature: Homolog of GI Number: 50947365 NR Desc: calcium
  misc_feature: Homolog of GI Number: 15221845 NR Desc: calcium
MSVEILDGATIVNFLQDEEAFSASVLNRFAYLDTDNDGLLSYAEMLKELQSLRVLETHFGIDVEPDPDELARVYESLFVQFDHNLNGTIDLDEFKKETKQMMLAMANGLGFLPVQMVLEEDSILKKAVEREFPKVAS

SEQ ID NO: 10607 - DNA, 844 bp, Glycine max
  misc_feature: Ceres CLONE ID no. 1650614
  misc_feature: Ceres CDNA ID no. 35383506
  CDS (45)..(686): REFERENCED BY SEQ ID NO: 10608
aggaagagaagagaggatagataggcctcagaagcagaacaacaatggccactgccactgtttcaatttcaacactatgcgctaccttcggaacccattgcgccatttcccacgaccctaaacctcttttttctcaacctttcagtctcaatcgctttccttctacctcttacaagctcactttatcgcctcgctcacctatttcaacccttcctaaggtctctgaatccgcggttgccgaaaccgaaaccggttcgtccgagcccgaaccggaccaaattgtcccggctcagcctccctcctgggaacccggtctcttcgctgtcgtaatgattggtggacgccaatatattgttcacccggggcgacatcttactgttcagaggttgaaaggtgctaatgttaatgataagattgccttacacaaggttttactggttggcactgatacatcttgctacattgggaaaccaattgtaacaaatgctgtagtatatgcaacagtggaagagcagggtctagaccccaaagtaattgtcttcaaatataaaaagaagaaacactatcgcagaaacattgggcacagacagccaaatacacgtatacggataaatagcattatgggctatgagaactacccaaaagttactatggacgacatcaaatcagacgaacccggatcatgaacaccttgtttactgtgcctatactgtagcttcttcctctttaaatatgaaattatttcgccattactagttttgctttaattagaaatgtaatttatggcatattgtaatattgtattgttgtaatctcctgtttacaaaaaaaaaaaaaaaaaaaa

SEQ ID NO: 10608 - protein, 213 aa, Glycine max
  misc_feature: Ceres CLONE ID no. 1650614
  misc_feature: Ceres CDNA ID no. 35383506
  misc_feature (91)..(187): Pfam Name: Ribosomal_L21p PFAM Desc: Ribosomal prokaryotic L21 protein
  misc_feature: Homolog of GI Number: 21436001 NR Desc: At1g35680/F15O4_7
  misc_feature: Homolog of GI Number: 50906793 NR Desc: putative 50S ribosomal protein L21
  misc_feature: Homolog of GI Number: 21315 NR Desc: L21 r
  misc_feature: Homolog of GI Number: 50932753 NR Desc: putative ribosomal protein L21
  misc_feature: Homolog of GI Number: 68269085 NR Desc: Ribosomal protein L21
  misc_feature: Homolog of GI Number: 71547907 NR Desc: Ribosomal protein L21
  misc_feature: Homolog of GI Number: 28211680 NR Desc: LSU ribosomal protein L21P
  misc_feature: Homolog of GI Number: 82746546 NR Desc: Ribosomal protein L21
  misc_feature: Homolog of GI Number: 39998326 NR Desc: ribosomal protein L21
MATATVSISTLCATFGTHCAISHDPKPLFSQPFSLNRFPSTSYKLTLSPRSPISTLPKVSESAVAETETGSSEPEPDQIVPAQPPSWEPGLFAVVMIGGRQYIVHPGRHLTVQRLKGANVNDKIALHKVLLVGTDTSCYIGKPIVTNAVVYATVEEQGLDPKVIVFKYKKKKHYRRNIGHRQPNTRIRINSIMGYENYPKVTMDDIKSDEPGS

SEQ ID NO: 10609 - DNA, 805 bp, Glycine max
  misc_feature: Ceres CLONE ID no. 1650639
  misc_feature: Ceres CDNA ID no. 35383507
  CDS (225)..(581): REFERENCED BY SEQ ID NO: 10610
aaactcggaagcaagtattccctggagtgtgtggtgtggtgttgctgttgcaaattgcaacactcagtcagcactgcaccactgcatttcatttcccagcttagctacaactacaagcccacgtcgctttcataaaaccacacccacctgccaccatcactttccccaaaacgcaacatcatcaaaacttaaactcagagaatcagagagagagagagagagaaatgagtgaagaagccaaaaagaacttcgccggagctctaacggcgaggcccaactccgatgagccgaaaccggcaccggtgccagctgttcccccgaagaaggtcatcatcaagagcgctgatatgatccccgacatgcagaaggaggccgttgatatcgccgtcgccgcgtttgagaagtacaatgtggagaaagacgttgcggagcagataaagaaggagttcgataagaggcatggccccacgtggcattgtatcgttggacgtaattttggctcatatgtgactcatgaaacaaaccactttgtttatttctacttggatcagaaagcggttttactctttaaatctggctagccttattgtggtagcaaagaagttgagatctatgggaattgtcttgtgattatgctgctgtatgcagtcccccatgtattaattccactgacactcaaaatctttgcaagacattcttgtgatcttgtccttgtatattggatgatatgtaaactagttatcggtttggatatgaatctaaggattaccttagaagagttttctaaaaaaaaaaaaaaaaaaaa

SEQ ID NO: 10610 - protein, 118 aa, Glycine max
  misc_feature: Ceres CLONE ID no. 1650639
  misc_feature: Ceres CDNA ID no. 35383507
  misc_feature (33)..(118): Pfam Name: Dynein_light PFAM Desc: Dynein light chain type 1
  misc_feature: Homolog of GI Number: 28466885 NR Desc: At4g15930
  misc_feature: Homolog of GI Number: 7268341 NR Desc: dynein light chain like protein
  misc_feature: Homolog of GI Number: 18034123 NR Desc: neuronal nitric oxide synthase protein inhibitor
  misc_feature: Homolog of GI Number: 47168753 NR Desc: Chain B
  misc_feature: Homolog of GI Number: 73966558 NR Desc:  similar to dynein light chain
  misc_feature: Homolog of GI Number: 68398128 NR Desc:  similar to Dynein light chain
  misc_feature: Homolog of GI Number: 73966570 NR Desc:  similar to dynein light chain
  misc_feature: Homolog of GI Number: 61872640 NR Desc:  similar to dynein light chain
  misc_feature: Homolog of GI Number: 76642713 NR Desc:  similar to dynein light chain
  misc_feature: Homolog of GI Number: 50758408 NR Desc:  similar to dynein light chain
MSEEAKKNFAGALTARPNSDEPKPAPVPAVPPKKVIIKSADMIPDMQKEAVDIAVAAFEKYNVEKDVAEQIKKEFDKRHGPTWHCIVGRNFGSYVTHETNHFVYFYLDQKAVLLFKSG

SEQ ID NO: 10611 - DNA, 780 bp, Glycine max
  misc_feature: Ceres CLONE ID no. 1650658
  misc_feature: Ceres CDNA ID no. 36707463
  CDS (186)..(599): REFERENCED BY SEQ ID NO: 10612
atctttgcgcttggggcaatgacgcagctagtgaggttctaaccgaggcgcgtctattgctggttgaaaactatttccaaaccccctcttaggcctgggttcaccctaggccttcgagaatttctggaagggctccctttggggcaaagccctaaaaagagttcaccaaaccaacacctttcaaaatgcaaacatccttaacctttgctgcccccaacgttgtgcctttggcacaaacaaagagtttctcccatgttgccatcttccctaccaatttgaaagccccacgctcttcacctcgttactctccgatcagggttgcaatcgtggagcctgacacttcaactgtggactacaactctgcgttctcagtgtttccagcggaagcatgcgaaactgttggaggggaagcctgcatggcagaaatgtaccctgaagtgaagctacagccagaagctaagacaccacgagttgttacagagaacgttgagagagagtatcttgaatacgatgatcctaaaacggtatttagaggagaggcttgtgatgatcttggaggaactttttgtgagaccgagtatcagaagggtgtctactagagaaaaaagaaaaccctttttattgccatggctactgcgtttttaatgtctaccagtaatgattgtagtggtgaatgtacataggtataggctatggatctcagtttatattgagtttcattttcgctataaactttacaataattatatactaaatttggtaaaaaaaaaaaaaaaaaaa

SEQ ID NO: 10612 - protein, 137 aa, Glycine max
  misc_feature: Ceres CLONE ID no. 1650658
  misc_feature: Ceres CDNA ID no. 36707463
  misc_feature (1)..(131): Pfam Name: Lir1 PFAM Desc: Light regulated protein Lir1
  misc_feature: Homolog of GI Number: 20725 NR Desc: GA
  misc_feature: Homolog of GI Number: 30385248 NR Desc: CCR protein
  misc_feature: Homolog of GI Number: 1085688 NR Desc: ccr protein
  misc_feature: Homolog of GI Number: 493636 NR Desc: CR9
  misc_feature: Homolog of GI Number: 20340235 NR Desc: light regulated protein
  misc_feature: Homolog of GI Number: 77023866 NR Desc: light
  misc_feature: Homolog of GI Number: 62642147 NR Desc: light regulated protein Lir1
  misc_feature: Homolog of GI Number: 20218807 NR Desc: putative cytokinin
  misc_feature: Homolog of GI Number: 34894038 NR Desc: putative light
MQTSLTFAAPNVVPLAQTKSFSHVAIFPTNLKAPRSSPRYSPIRVAIVEPDTSTVDYNSAFSVFPAEACETVGGEACMAEMYPEVKLQPEAKTPRVVTENVEREYLEYDDPKTVFRGEACDDLGGTFCETEYQKGVY

SEQ ID NO: 10613 - DNA, 771 bp, Glycine max
  misc_feature: Ceres CLONE ID no. 1650720
  misc_feature: Ceres CDNA ID no. 35383508
  CDS (53)..(484): REFERENCED BY SEQ ID NO: 10614
ataaaccataactgaagaaaactaaggaaggaaggaagagtgagcgtgaaagatgccttgggcgaggctttcagggtctccaaggctcgacgttgctattgacatgggcaatccatttctcaatctcactgttgatggtttccttaagatcggagctgtcgcagccacgcgatcagctgctgaagatacttatcatattatccaaaaggggaatatctcaagtcatgatttcgagaaaacgttgaagaagatgtgcaaagaaggtgtatattggggaactatagctggcgtttatgttggaatggaatatggggtagagaggatccgtggcaccagagattggaagaatgccatgattgggggtgcagtaactggggccctggtatctgcagccagcaacaacaagaaagacaaaattgcaatagatgccattactggggcagcaattgctactgctgcagagttcataaattaccttacctgaatgaatgaaagtggatgtcttgctggttttcttgcatgttttggaaaaggattgcacactcagtctctctttagtcatactctgtaccggttccgtctttgatattggtgcagttacttctaagatatgctatttatttaactttctataaaacccatgttttgataaattatattggccattcggttttctgcatgttagtagctttgccttgcaatttagtcaagctagacttgtgcaattatgtcaaagcatgttcagttcgatttaaaaaaaaaaaaaaaaaa

SEQ ID NO: 10614 - protein, 143 aa, Glycine max
  misc_feature: Ceres CLONE ID no. 1650720
  misc_feature: Ceres CDNA ID no. 35383508
  misc_feature (15)..(143): Pfam Name: Tim17 PFAM Desc: Tim17/Tim22/Tim23 family
  misc_feature: Homolog of GI Number: 1370287 NR Desc: core protein
  misc_feature: Homolog of GI Number: 60279270 NR Desc: pom14
  misc_feature: Homolog of GI Number: 52353640 NR Desc: putative amino acid selective channel protein
  misc_feature: Homolog of GI Number: 3758827 NR Desc: amino acid selective channel protein
  misc_feature: Homolog of GI Number: 21536521 NR Desc: putative membrane channel protein
  misc_feature: Homolog of GI Number: 3927837 NR Desc: putative membrane channel protein
  misc_feature: Homolog of GI Number: 34906056 NR Desc: P0698H10.23
  misc_feature: Homolog of GI Number: 34905526 NR Desc: B1146F03.20
  misc_feature: Homolog of GI Number: 48525521 NR Desc: stress
  misc_feature: Homolog of GI Number: 16555405 NR Desc: stress
MPWARLSGSPRLDVAIDMGNPFLNLTVDGFLKIGAVAATRSAAEDTYHIIQKGNISSHDFEKTLKKMCKEGVYWGTIAGVYVGMEYGVERIRGTRDWKNAMIGGAVTGALVSAASNNKKDKIAIDAITGAAIATAAEFINYLT

SEQ ID NO: 10615 - DNA, 1074 bp, Glycine max
  misc_feature: Ceres CLONE ID no. 1650743
  misc_feature: Ceres CDNA ID no. 29191463
  CDS (65)..(760): REFERENCED BY SEQ ID NO: 10616
acacagaacaatagtagcaagcagagccccaagacgagcttcaccttgcgccgaagggccacagatggttgaaaccgatatggatgccgaaactgttgcaaatgtggttccaccaaaggagactccaaacagtgttcccatctcttatcattcctcacactcacaccctcctcttaatgagaggattatttcatccatgaccagaagatctgttgctgcacacccgtggcacgaccttgagatagggcctggtgctccaacgatcttcaattgtgtgattgagattgggaaagggagcaaggtgaaatatgaactggacaaaaaatcgggtcttatcaagatcgaccgtgttctttactcatcagttgtgtatcctcacaattatgggtttatcccacgtactatttgtgaggacagtgatcccctggatgtcttgattattatgcaggagccggttcttccaggttgctttcttcgggccaaagcaattggtctcatgcccatgattgatcagggggagaaagatgataagataattgctgtctgtgctgatgatcccgagtatcgacattacaatgatatcaaggagcttcctccacatcgtttagctgaaattcgtcgtttttttgaagactacaagaagaatgaaaacaaggaagtcgcagtaaacgactttttgcctgcctcagctgctttcgaagcggttaatagatccatgagcttgtatgcggactacatagtggagagcttgagacggtagtcgttgatgaatgatgcacgtcaaggatttttaactgacggaccaatggaagatgtttgcttgaaaaaaggctgcattatcaatattatgtaggaataaaaaaaaacattttactttagctgcctcttagctcatgcatgttctacaaactgtgcttaatttcaaatatgtcatccctgcaatatcaaatttacctgcctcttatagcacatgcacaatccaatatcaaatgttttaatcttgtataattttatattctcaccctttctattagaaagagtgtaatggttttttaaaaaaaaaaaaaaaaaaaa

SEQ ID NO: 10616 - protein, 231 aa, Glycine max; identical to SEQ ID NO: 3218
  misc_feature: Ceres CLONE ID no. 1650743
  misc_feature: Ceres CDNA ID no. 29191463
  misc_feature: null
  misc_feature: Useful for making plants with modulated nitrogen use efficiency
  misc_feature (69)..(223): Pfam Name: Pyrophosphatase PFAM Desc: Inorganic pyrophosphatase
  misc_feature: Homolog of GI Number: 6752884 NR Desc: soluble inorganic pyrophosphatase
  misc_feature: Homolog of GI Number: 48927683 NR Desc: putative inorganic pyrophosphatase
  misc_feature: Homolog of GI Number: 6729513 NR Desc: inorganic pyrophosphatase
  misc_feature: Homolog of GI Number: 50931109 NR Desc: putative inorganic pyrophosphatase
  misc_feature: Homolog of GI Number: 21593570 NR Desc: inorganic pyrophosphatase
  misc_feature: Homolog of GI Number: 2706450 NR Desc: magnesium dependent soluble inorganic pyrophosphatase
  misc_feature: Homolog of GI Number: 5669924 NR Desc: soluble inorganic pyrophosphatase
  misc_feature: Homolog of GI Number: 21537232 NR Desc: soluble inorganic pyrophosphatase
  misc_feature: Homolog of GI Number: 534916 NR Desc: soluble inorganic pyrophosphatase
  misc_feature: Homolog of GI Number: 78708597 NR Desc: inorganic pyrophosphatase
  misc_feature: Useful for making plants with altered leaf shape eg curled leaves

SEQ ID NO: 10617 - DNA, 774 bp, Glycine max
  misc_feature: Ceres CLONE ID no. 1650821
  misc_feature: Ceres CDNA ID no. 36706762
  CDS (1)..(552): REFERENCED BY SEQ ID NO: 10618
atttattcttcttctctttgctctcacaatggccaaaacactcttcctctttttcttcatgttactggctacctccgctctctctcaatctccgtcagcctcccccgccgccacccccaaatcctctccgtctccgccacaggctgcctcccccaaagcctctcctccaactacttcttccgctccaccacccaccacccctcctccacccgctcccgcccccgtttcgaaaaccgctccggcctcttctccgccgtcccccaccccctcctccggccccaccgcctcctctccctcctccgactcccccaccggttctccccccgcccccgtctctccctccgactcccccctcccctccggccccgccgtcgtcagcgacggacccgccgactcccccgccgtcagccccagcagccacgcccacctctgcagagtctccgcctccgaatctgtcgccgccgtcgccttcgccgctgcagtcgccttgatgatgtagatccggtagttgtgtatgggttagggttttattttatgattattgttatttagtagtataaatattgagcacgagactttctttagagacactgaacattttgtttttattatttattattctcattagtgagtggtgggaaatcatgttcatagtgccttctcggagatcatgtcctttagggtttcatttcgatagcttcactctctcagactcagactaccattattaatattattactatcatcattatttaaaaaaaaaaaaaaaaaaaa

SEQ ID NO: 10618 - protein, 156 aa, Glycine max
  misc_feature: Ceres CLONE ID no. 1650821
  misc_feature: Ceres CDNA ID no. 36706762
  misc_feature: Homolog of GI Number: 6523547 NR Desc: hydroxyproline
  misc_feature: Homolog of GI Number: 76262500 NR Desc: pherophorin
  misc_feature: Homolog of GI Number: 76262498 NR Desc: pherophorin
  misc_feature: Homolog of GI Number: 21322711 NR Desc: pherophorin
  misc_feature: Homolog of GI Number: 46850179 NR Desc: cell wall protein GP2
  misc_feature: Homolog of GI Number: 4584539 NR Desc: extensin
MAKTLFLFFFMLLATSALSQSPSASPAATPKSSPSPPQAASPKASPPTTSSAPPPTTPPPPAPAPVSKTAPASSPPSPTPSSGPTASSPSSDSPTGSPPAPVSPSDSPLPSGPAVVSDGPADSPAVSPSSHAHLCRVSASESVAAVAFAAAVALMM

SEQ ID NO: 10619 - DNA, 684 bp, Glycine max
  misc_feature: Ceres CLONE ID no. 1650852
  misc_feature: Ceres CDNA ID no. 29191796
  CDS (104)..(454): REFERENCED BY SEQ ID NO: 10620
actgtttattcaacattcaaagaaataaactcacgcactaatcactactacacaaatcacacacacacacacagagttgcaagagaaagagagcgagattccgatggcgactctggattccgacgtgcctatggttcccgccggcgagccctcgagcagcgccggtccttcttccaagaagcccaagcgcttcgagatcaagaagtggaacgccgtcgctctctgggcttgggacatcgttgtcgataactgtgctatctgccggaaccacatcatggatctctgcatcgagtgccaagccaaccaggctagcgccactagcgaggaatgcactgtggcatggggagtctgtaaccatgcttttcacttccattgcattagtcgatggctcaagacccgtcaagtttgtcctctagataacagtgagtgggagtttcagaaatatggccactagaactatgacgtggttgagctccttggacatttggaatgtctatcctagcttttgaacatttacagctctatctgttattttcctttgctttcctactgaatttattatgttcaagaaatcagcttgtctgatggaattttatatacacggtggtaatatgtaaagttttattttaatgttttgatttacgtatttcatatgcttcctttcaaaaaaaaaaaaaaaaaaaa

SEQ ID NO: 10620 - protein, 116 aa, Glycine max; identical to SEQ ID NO: 3398
  misc_feature: Ceres CLONE ID no. 1650852
  misc_feature: Ceres CDNA ID no. 29191796
  misc_feature (83)..(104): Pfam Name: zf PFAM Desc: Zinc finger
  misc_feature: Homolog of GI Number: 83701143 NR Desc: RING
  misc_feature: Homolog of GI Number: 21592528 NR Desc: ring
  misc_feature: Homolog of GI Number: 31747517 NR Desc: ring box protein
  misc_feature: Homolog of GI Number: 55769719 NR Desc: putative ring
  misc_feature: Homolog of GI Number: 47087614 NR Desc: putative ring
  misc_feature: Homolog of GI Number: 50911983 NR Desc: putative RING box protein 1
  misc_feature: Homolog of GI Number: 7543891 NR Desc: ring
  misc_feature: Homolog of GI Number: 72018809 NR Desc:  similar to RING
  misc_feature: Homolog of GI Number: 48095046 NR Desc: similar to ENSANGP00000010437
  misc_feature: Homolog of GI Number: 50728692 NR Desc:  similar to RBX1 protein

SEQ ID NO: 10621 - DNA, 893 bp, Glycine max
  misc_feature: Ceres CLONE ID no. 1650856
  misc_feature: Ceres CDNA ID no. 36707573
  CDS (89)..(577): REFERENCED BY SEQ ID NO: 10622
gtgctcactcatctatctattataaccaaacactcttcttcatattcttcttcttcttcttgttcttgttctatctgtgacgagcatcatggcctcgagagcagtgctattgttggctatgtgtgtgcttccggccatggttgtggccattcgcccagcaaagaaccctttttgcgtgaagggtcgcgtctactgtgacccttgccgtgctggttttgagacctcagcaaccacctacattgccggtgctgagattatgttgcaatgcaagagcagggttagcaacgaggttgtgtacaccaagaaggggtacactgactcaactggagcatacacaatgtacgtggacgaggatcacgcagatcaaatatgcagtgccaagcttgtaagcagccctcaccctcaatgcaaggaagtcaccccgggccgcgacgaagccgtcgttattctcacccgctacaacggcattgcatccgatgataggttcgccaatgccatgggcttcatgtctcaggaggttgcttctggctgtgctgaggtcctcaggcaatacgaggagttcgacaatgagaattaattacgtaattaatttcagtaatactgttattattaatctactttcgatttgggttttctaatgtctatttaattcaatcttgatgtggagtcttatctcgacattttcatattatcatgttatatatgttgatggaccgaccctgcttaattatattattacatcaagatctatcctggactatgaggatgatgtagtctattttgtgtcgttataataaactattcttttatatctgcattcattgtagatgggttttgtttttcgtcaagaatcaagaatattgatttgctagtaaaaaaaaaaaaaaaaaaaa

SEQ ID NO: 10622 - protein, 162 aa, Glycine max; identical to SEQ ID NO: 4204
  misc_feature: Ceres CLONE ID no. 1650856
  misc_feature: Ceres CDNA ID no. 36707573
  misc_feature (30)..(150): Pfam Name: Pollen_Ole_e_I PFAM Desc: Pollen proteins Ole e I family
  misc_feature: Homolog of GI Number: 6561156 NR Desc: allergen
  misc_feature: Homolog of GI Number: 47026963 NR Desc: pollen
  misc_feature: Homolog of GI Number: 31431642 NR Desc: putative Pollen specific protein C13 precursor
  misc_feature: Homolog of GI Number: 29836467 NR Desc: putative SAH7 protein
  misc_feature: Homolog of GI Number: 29836473 NR Desc: putative SAH7 protein
  misc_feature: Homolog of GI Number: 21592341 NR Desc: allergen
  misc_feature: Homolog of GI Number: 29836465 NR Desc: putative SAH7 protein
  misc_feature: Homolog of GI Number: 25990491 NR Desc: LLP
  misc_feature: Homolog of GI Number: 29836469 NR Desc: putative SAH7 protein
  misc_feature: Homolog of GI Number: 25405021 NR Desc: protein F28K19.26

SEQ ID NO: 10623 - DNA, 957 bp, Glycine max
  misc_feature: Ceres CLONE ID no. 1650947
  misc_feature: Ceres CDNA ID no. 25891857
  CDS (94)..(603): REFERENCED BY SEQ ID NO: 10624
actattccgtttctctcttcactcttctttcgccacacactcactctctctctctctctctctctctctctctctgctcccattaatttcacgatggcaacactcttcgactctctcgccgtcgtgcgtctccccaccgccgcccgccggacctccgttatgctcccgcactgcgctggcctcaggctcagacccgccgccgcttcgcgcctagttgcgtcccccgctcgcaggatcgcttctcgcgcagcgcgcgtcgcctgcgaggctcaggacaccgccgtggaagtggctcctattactgatgcaaactggcaatcccttgtccttgaatccgaatctgctgttttggttgaattctgggcgccatggtgtggtccctgccgaatgattcaccctataattgatgaacttgcaaagcaatatgctgggaagctcaagtgttacaaactcaacactgatgagagcccttcaaccgctactcggtatggaattcgaagcatcccaactgttatgatcttcaagagtggtgagaagaaagatacagttattggtgctgtgcccaagtcaacattgaccacgagcatagaaaaattcgtatgaggtggtaagtaaagaaggcctttgctggaagtaaagcagtttttcctattagcttcttttcttctgagccccatgtctcaagtttcgatattttgtttacccaaatactcatttatgctcctgtacagtgatcagatgctacctaattttatgtttttagattattctagttaccaatatgctaagtgaattttccattgaatcatagcacgttttaaattgattgttacatatttgtctggcttctgtttcgtttcaactttcactcaacactgatgacatatggggtacctgtataaaacaaattagataattcatattaaatttgttgggtctaaaaaaaaaaaaaaaaaa

SEQ ID NO: 10624 - protein, 169 aa, Glycine max; identical to SEQ ID NO: 2176
  misc_feature: Ceres CLONE ID no. 1650947
  misc_feature: Ceres CDNA ID no. 25891857
  misc_feature (65)..(167): Pfam Name: Thioredoxin PFAM Desc: Thioredoxin
  misc_feature: Homolog of GI Number: 15594012 NR Desc: putative thioredoxin m2
  misc_feature: Homolog of GI Number: 7021721 NR Desc: thioredoxin m4
  misc_feature: Homolog of GI Number: 6539614 NR Desc: thioredoxin m4
  misc_feature: Homolog of GI Number: 62320065 NR Desc: putative M
  misc_feature: Homolog of GI Number: 6539610 NR Desc: thioredoxin m2
  misc_feature: Homolog of GI Number: 21618235 NR Desc: putative M
  misc_feature: Homolog of GI Number: 5566283 NR Desc: thioredoxin
  misc_feature: Homolog of GI Number: 50926654 NR Desc: OSJNBa0074L08.22
  misc_feature: Homolog of GI Number: 50911078 NR Desc: putative Thioredoxin M
  misc_feature: Homolog of GI Number: 28973241 NR Desc: putative thioredoxin
  misc_feature: Useful for delaying flowering time
  misc_feature: Useful for increasing chlorophyll and photosynthetic capacity
  misc_feature: Useful for making ornamental plants with modified leaves
  misc_feature: Useful for making plants with altered leaf shape eg curled leaves
  misc_feature: Useful for making plants with increased biomass
  misc_feature: Useful for making plants with increased biomass and foliage
  misc_feature: Useful for making plants with increased biomass and foliage
  misc_feature: Useful for sterility

SEQ ID NO: 10625 - DNA, 772 bp, Glycine max
  misc_feature: Ceres CLONE ID no. 1651048
  misc_feature: Ceres CDNA ID no. 36707574
  CDS (13)..(393): REFERENCED BY SEQ ID NO: 10626
actattctcaccatgggcctcctcgatcacttgtgggatgacaccctcgccggtcctcgcccggagaacggcctcggcaagctccgaaagcaccactccttcgctttccgatctgcctccgccaaggaatcagacagcggaagcgtgaaatcgtacggtgaggattcgcccaagaatgcggtgagagtgacgcgaagtataatgatcgtgaaaccacctggtaaccagagtcccagtggatccgctccggcttcccccgccggttctactcctccggtgtctccgttttcgggagctagagaatccttccgttttcggagaaggtcaacatcagatgcgtacgagaagacaggccagaacagatcaagctcttcttctcctttcgatgtgtgagaaatgagcctgaccactatatatcctccatggatcgatgactgaaataaaatatatatagtagtttgtttttctctagcctttgcggatgatgctgtatccatttttgtttatgttaattttgtgcatatatatagtatatagtatatagcatatgtatgaatatgtttacgagttcatcagttgagcgattgaagtcctgaaacgatcgaggtagctgtgtgtggtttaacagcttggtcttgttttattgttgaactggtttatggttcggaagctgtaaataagtaataacgtagtataggtgtgtttttgttacgtgtactttgtatatatataaaagcctttccattccaaaaaaaaaaaaaaaaaaaaaaaa

SEQ ID NO: 10626 - protein, 126 aa, Glycine max
  misc_feature: Ceres CLONE ID no. 1651048
  misc_feature: Ceres CDNA ID no. 36707574
  misc_feature (7)..(121): Pfam Name: Auxin_repressed PFAM Desc: Dormancy/auxin associated protein
  misc_feature: Homolog of GI Number: 21553000 NR Desc: Drm4
  misc_feature: Homolog of GI Number: 21552998 NR Desc: Drm3
  misc_feature: Homolog of GI Number: 21592368 NR Desc: putative auxin
  misc_feature: Homolog of GI Number: 2688824 NR Desc: putative auxin
  misc_feature: Homolog of GI Number: 30696084 NR Desc: dormancy/auxin associated family protein
  misc_feature: Homolog of GI Number: 76161010 NR Desc: Drm3
  misc_feature: Homolog of GI Number: 18476508 NR Desc: ultraviolet
  misc_feature: Homolog of GI Number: 27802109 NR Desc: auxin
  misc_feature: Homolog of GI Number: 15221029 NR Desc: dormancy/auxin associated protein
MGLLDHLWDDTLAGPRPENGLGKLRKHHSFAFRSASAKESDSGSVKSYGEDSPKNAVRVTRSIMIVKPPGNQSPSGSAPASPAGSTPPVSPFSGARESFRFRRRSTSDAYEKTGQNRSSSSSPFDV

SEQ ID NO: 10627 - DNA, 706 bp, Glycine max
  misc_feature: Ceres CLONE ID no. 1651190
  misc_feature: Ceres CDNA ID no. 29191623
  CDS (111)..(518): REFERENCED BY SEQ ID NO: 10628
agatatacattctcttgtcacagttttctgtgtcaccggaactcgtttctttcaaaacacttcaaacatctcgaacgctctctttccggcaactaggttaaagttcatcaatggcaggtcgcggcaaaaccctaggatctagcgccgccaagaaggctacctcaaggagcagcaaagccggcctccaattccccgtcggccgtatcgcccgtttcctcaaggccggaaaatacgctgagcgtgtcggcgccggcgcccctgtctacctcgccgccgtactcgaatatctcgcggctgaggttttggaattggctggaaacgctgcgagagacaacaagaagactcgaattgtgccgcgccacattcaattggcggtgaggaacgacgaggagttgagcaagctactcggtgacgtcaccatcgctaacggtggcgtcatgcctaacattcacaatcttctccttcccaagaaggctggtggatcatccaaggctgctgctgcagacgatgactcttaaataggggttttttttccgtgaaaagttatcgaatttattctctttggattctctctgtttttgtagtttttcagtttttgataattgtgttctgtagatgtagttaggttttcagtcactgatgtgaatagagaacgctctttttcttcaagaaagattgttggaaattcaaaaaaaaaaaaaaaaaa

SEQ ID NO: 10628 - protein, 135 aa, Glycine max
  misc_feature: Ceres CLONE ID no. 1651190
  misc_feature: Ceres CDNA ID no. 29191623
  misc_feature (25)..(89): Pfam Name: CBFD_NFYB_HMF PFAM Desc: Histone
  misc_feature: Homolog of GI Number: 50945929 NR Desc: putative histone H2A
  misc_feature: Homolog of GI Number: 50938211 NR Desc: putative histone H2A
  misc_feature: Homolog of GI Number: 536896 NR Desc: protein H2A
  misc_feature: Homolog of GI Number: 17065594 NR Desc: putative histone H2A protein
  misc_feature: Homolog of GI Number: 21593834 NR Desc: histone H2A
  misc_feature: Homolog of GI Number: 29824201 NR Desc: putative histone H2A
  misc_feature: Homolog of GI Number: 21617982 NR Desc: histone H2A
  misc_feature: Homolog of GI Number: 19310641 NR Desc: putative histone H2A protein
  misc_feature: Homolog of GI Number: 77555213 NR Desc: Core histone H2A/H2B/H3/H4
  misc_feature: Homolog of GI Number: 50938209 NR Desc: histone H2A
MAGRGKTLGSSAAKKATSRSSKAGLQFPVGRIARFLKAGKYAERVGAGAPVYLAAVLEYLAAEVLELAGNAARDNKKTRIVPRHIQLAVRNDEELSKLLGDVTIANGGVMPNIHNLLLPKKAGGSSKAAAADDDS

SEQ ID NO: 10629 - DNA, 580 bp, Glycine max
  misc_feature: Ceres CLONE ID no. 1652095
  misc_feature: Ceres CDNA ID no. 29191388
  CDS (136)..(435): REFERENCED BY SEQ ID NO: 10630
actcctctcttccaagttctctctctctgtgtatattcaaatccatactatcactttcgcatcggtacttctcttttcattgtcgcgcagacacaaatcagtaccatacgaagcccgacactacgtgaattaagcatgtcgggcagaaaggaaacggttttggaccttgcaaagtttgtagacaaaggcgttcaagttaagcttactggtggcagacaagtgacagggactctgaaagggtatgatcagttgcttaaccttgtcctagatgaagctgtagagtttttaagagatcctgatgatcccctcaaaactaccgatcagaccagaaatcttggcttaattgtttgtagaggaactgctgtcatgcttgtgtccccaactgatggtacagatgagatcgccaacccctttatacagccagatgggtcttaagtgtgaagtatttctatcttaaaatctgtatgctagctgatcaatagtcatcgcttagctactgagacattaatgtggagattctgattaacgttttgtctattttgtaagcttggagattctgacccaaaaaaaaaaaaaaaaa

SEQ ID NO: 10630 - protein, 99 aa, Glycine max
  misc_feature: Ceres CLONE ID no. 1652095
  misc_feature: Ceres CDNA ID no. 29191388
  misc_feature: The plant flowers significantly late compared to wild-type.
  misc_feature: The plant senesces significantly late copared to wild-type.
  misc_feature: Useful for making plants with modulated flowering time
  misc_feature: Useful for making plants with modulated time to senescence
  misc_feature (9)..(82): Pfam Name: LSM PFAM Desc: LSM domain
  misc_feature: Homolog of GI Number: 4582434 NR Desc: putative snRNP splicing factor
  misc_feature: Homolog of GI Number: 50941651 NR Desc: putative snRNP splicing factor
  misc_feature: Homolog of GI Number: 72131952 NR Desc:  similar to LSM7 homolog
  misc_feature: Homolog of GI Number: 58389878 NR Desc: ENSANGP00000010565
  misc_feature: Homolog of GI Number: 20129565 NR Desc: CG13277
  misc_feature: Homolog of GI Number: 73987505 NR Desc:  similar to U6 snRNA
  misc_feature: Homolog of GI Number: 49522817 NR Desc: MGC83430 protein
  misc_feature: Homolog of GI Number: 55647895 NR Desc:  similar to U6 snRNA
  misc_feature: Homolog of GI Number: 7706423 NR Desc: U6 snRNA
  misc_feature: Homolog of GI Number: 34862278 NR Desc: similar to RIKEN cDNA 0910001B06
  misc_feature: Useful for delaying flowering time
  misc_feature: Useful for delaying senescence
MSGRKETVLDLAKFVDKGVQVKLTGGRQVTGTLKGYDQLLNLVLDEAVEFLRDPDDPLKTTDQTRNLGLIVCRGTAVMLVSPTDGTDEIANPFIQPDGS

SEQ ID NO: 10631 - DNA, 627 bp, Glycine max
  misc_feature: Ceres CLONE ID no. 1652181
  misc_feature: Ceres CDNA ID no. 25891810
  CDS (71)..(472): REFERENCED BY SEQ ID NO: 10632
acaaaacgcatcacaacacaacacaacacaatattagcaccacaattaagaagaagaaacacagaacaagatgtcgtggcaaacttatgttgatgatcatttgatgtgtgatattgatggcacaggccaccatctctccgatgctgccatcatcggccatgatggctctgtttgggctcaaagctcttcttttcctcagattaaatctcaagaaatcactgatatcatgaaagatttcgatgaaccgggttatcttgctcctacaggtttgcaccttgcaggaaccaaatacatggtcatccaaggagagtcaggagctgtcattcgtggaaagaagggatctggaggcatcaccataaagaaaactggtcaagctttagtttttggtatttatgaggaacctgtgactcctggacaatgcaacatggttgttgagaggttgggagattacctcattgaacaaggtctttagacctagctagatttatatatcatgtttggaacatttttgtttcttggatactatacttttgttattttcatattttttaattgtatctactatatatcaaccctaaattgggagttgttgcagacaataaccatacgaaaaaaaaaaaaaaaaaa

SEQ ID NO: 10632 - protein, 133 aa, Glycine max
  misc_feature: Ceres CLONE ID no. 1652181
  misc_feature: Ceres CDNA ID no. 25891810
  misc_feature: The plant is abnormally small.
  misc_feature: The plant produces a reduced number of seeds.
  misc_feature: Useful for biocontainment applications
  misc_feature: Useful for making plants with modulated biomass
  misc_feature (2)..(128): Pfam Name: Profilin PFAM Desc: Profilin
  misc_feature: Homolog of GI Number: 2959898 NR Desc: Profilin
  misc_feature: Homolog of GI Number: 1942360 NR Desc: Birch Pollen Profilin
  misc_feature: Homolog of GI Number: 21537389 NR Desc: profilin 3
  misc_feature: Homolog of GI Number: 1399496 NR Desc: profilin
  misc_feature: Homolog of GI Number: 30841324 NR Desc: profilin
  misc_feature: Homolog of GI Number: 21553773 NR Desc: profilin 4
  misc_feature: Homolog of GI Number: 541814 NR Desc: profilin
  misc_feature: Homolog of GI Number: 28393116 NR Desc: putative profilin 3
  misc_feature: Homolog of GI Number: 28881453 NR Desc: profilin
  misc_feature: Homolog of GI Number: 4761580 NR Desc: profilin
MSWQTYVDDHLMCDIDGTGHHLSDAAIIGHDGSVWAQSSSFPQIKSQEITDIMKDFDEPGYLAPTGLHLAGTKYMVIQGESGAVIRGKKGSGGITIKKTGQALVFGIYEEPVTPGQCNMVVERLGDYLIEQGL

SEQ ID NO: 10633 - DNA, 838 bp, Glycine max
  misc_feature: Ceres CLONE ID no. 1652280
  misc_feature: Ceres CDNA ID no. 40041535
  CDS (8)..(196): REFERENCED BY SEQ ID NO: 10634
aactttgatgaatgaaagtcttgtgataaacaactcaaagttgaacttctctcctttctttcttccttcagtttcgtgctcccccctctctctttctctccctctttcttttcctccattgaagcatcctctccaagcttcttatccaaggctcatcttggtggtgaagctccttcttccatggcttattccctagtggatgacacctcctctcacctcttctcctttgtcttctgctgcatctccatggtggaaaatcaccattaaaggacctcattgaagctcaaagatccagcctccatagaatcctcacaagcaagtttccatcaagtggtaatcagagcacaagagcttcaaggaattggaaagaggattggtgccatcccatgaagaatttgagtcaagaagaaaggggccaaccaccttaagagctattggactaagaagcaatccaaattgagtgaatcaccaaagagagaacaaccaccaaaattgaggaccattttgtaattttgtaattttcaatttacttacctttattgctttcaagttttgtaacaaaaaggcctttcattggaagtgtgttgggagcctccaataggttaccaaacttccatttgtgtgtaataattttaggcaatttttccttaggatagttagtgttttgttgggaaccttgaatgtggtaatccaaacactcttaggattcgcctagtttacatttcttgcttactttcatagcttatttcctttaccttccattgtcaaaccacctagatagctttccttttaccaattaattttttaccttatctttcaaaaaaaaaaaaaaaaaaaa

SEQ ID NO: 10634 - protein, 62 aa, Glycine max
  misc_feature: Ceres CLONE ID no. 1652280
  misc_feature: Ceres CDNA ID no. 40041535
MNESLVINNSKLNFSPFFLPSVSCSPLSLSLPLSFPPLKHPLQASYPRLILVVKLLLPWLIP

SEQ ID NO: 10635 - DNA, 772 bp, Glycine max
  misc_feature: Ceres CLONE ID no. 1652336
  misc_feature: Ceres CDNA ID no. 29191375
  CDS (56)..(526): REFERENCED BY SEQ ID NO: 10636
ctcaccgcacagaattagggttttccaattcacagagcaacacaacgaaccaacaatggcgcagcctcagccgcagtcgcagccgcagcacgggcaagcagcgctggagcaggtgcagtgcttcggtcgcaagaagaccgccgtggccgtgacctactgcaagcgcgggcgcggtctcatcaagatcaacggctgccccattgagctcgtggagccggagatcctccgcttcaaggccttcgagcctatcctcctgttgggtaagagccgcttcgccggcgtcgacatgcgcatccgcgtcaagggtggcggccacacctcccagatctacgccatccgccagagcatcgccaaggcgctcgtcgcgttctaccagaagtatgtcgacgaacagagtaagaaggagatcaaggacattctcgtgaggtacgatcgcaccttgctcgttgcggatcccaggcgctgcgagcccaagaagtttggtgggcgtggcgcacgtgcgaggttccagaagtcttaccgttgaagaagaatggtggtggtgttttcgtgtttttggcttttggtttcggttcatgttttatgctgtggaaaaaatgaatactttcgttgctggtggtttttggtagttttataattttggtcgcttttttataattgttggatttgatgttgttttaattcaactttttttgtttaggtacaatgaaggtatgaagttattatcattattataaattctagttttaatgtcaaaaaaaaaaaaaaaaaa

SEQ ID NO: 10636 - protein, 156 aa, Glycine max
  misc_feature: Ceres CLONE ID no. 1652336
  misc_feature: Ceres CDNA ID no. 29191375
  misc_feature (24)..(156): Pfam Name: Ribosomal_S9 PFAM Desc: Ribosomal protein S9/S16
  misc_feature: Homolog of GI Number: 6984222 NR Desc: 40S ribosomal protein S16
  misc_feature: Homolog of GI Number: 439654 NR Desc: RS16 protein
  misc_feature: Homolog of GI Number: 21555842 NR Desc: 40S ribosomal protein S16
  misc_feature: Homolog of GI Number: 16323500 NR Desc: putative 40S ribosomal protein S16
  misc_feature: Homolog of GI Number: 2641209 NR Desc: ribosomal protein S16
  misc_feature: Homolog of GI Number: 4574242 NR Desc: ribosomal protein S16
  misc_feature: Homolog of GI Number: 6721162 NR Desc: putative 40S ribosomal protein S16
  misc_feature: Homolog of GI Number: 77552917 NR Desc: ribosomal protein S9
  misc_feature: Homolog of GI Number: 7440266 NR Desc: probable ribosomal protein S16
  misc_feature: Homolog of GI Number: 40556671 NR Desc: small subunit ribosomal protein S16
MAQPQPQSQPQHGQAALEQVQCFGRKKTAVAVTYCKRGRGLIKINGCPIELVEPEILRFKAFEPILLLGKSRFAGVDMRIRVKGGGHTSQIYAIRQSIAKALVAFYQKYVDEQSKKEIKDILVRYDRTLLVADPRRCEPKKFGGRGARARFQKSYR

SEQ ID NO: 10637 - DNA, 807 bp, Glycine max
  misc_feature: Ceres CLONE ID no. 1652614
  misc_feature: Ceres CDNA ID no. 29191376
  CDS (191)..(691): REFERENCED BY SEQ ID NO: 10638
atctgttaataatgcataatggtatcatatcctttcctttgaccgacaggtgtgaatctcacctttgtcctctcctctcattaaccccacctgttgctaccggtgaagaggttgttccactgcctttaagtctcattcttactcattgctattcctcattcacaaatcacaacatatccattggagtataatgggtgaacaattggggctgctaaaagtcattgttgtgcaagggaaaaggttggtgatccgggatttcaagaccagtgatccttatgttgtgctcaagctagggaatcagactgcaaagaccaaggtaattaatagctgcttgaatcctgtttggaatgaggagctgaatttcactctgacagaacccttgggagttctgaatttggaagtgtttgataaagatcttctgaaggctgatgacaagatggggaatgctttcctgaaccttcaaccaatagtctctgcagccagattaagagacatcttaagagtgtcctctggtgagacgacattaaggaaggtcatacctgatggtgaaaactgtcttgtccgtgaaagcagtatcaactgtgtgaatggtgaggtggtgcagaatgtttggttaaggcttcgtggagttgagtctggggaactagaattgaccatcaagttgatcacacatgttgctcctgcaatatagtgcaacaattgcatgtgtcataagtgtagatctctaactaacattttatgtctagtcgagtcttgcttttgattaactcctgcatagatgtttctacccaaaaaaaaaaaaaaaaa

SEQ ID NO: 10638 - protein, 166 aa, Glycine max; identical to SEQ ID NO: 10302
  misc_feature: Ceres CLONE ID no. 1652614
  misc_feature: Ceres CDNA ID no. 29191376
  misc_feature (8)..(87): Pfam Name: C2 PFAM Desc: C2 domain
  misc_feature: Homolog of GI Number: 50899010 NR Desc: C2 domain
  misc_feature: Homolog of GI Number: 50931293 NR Desc: putative zinc finger protein
  misc_feature: Homolog of GI Number: 50907613 NR Desc: C2 domain
  misc_feature: Homolog of GI Number: 50904513 NR Desc: putative zinc finger and C2 domain protein
  misc_feature: Homolog of GI Number: 9294500 NR Desc: GTPase activating protein
  misc_feature: Homolog of GI Number: 51091945 NR Desc: putative zinc finger and C2 domain protein
  misc_feature: Homolog of GI Number: 21536965 NR Desc: putative zinc finger and C2 domain protein
  misc_feature: Homolog of GI Number: 50912253 NR Desc: putative zinc finger and C2 domain protein
  misc_feature: Homolog of GI Number: 50905999 NR Desc: putative zinc finger and C2 domain protein
  misc_feature: Homolog of GI Number: 21594052 NR Desc: putative GTPase activating protein
  misc_feature: Utility: PEG Useful for making plants with increased tolerance to drought

SEQ ID NO: 10639 - DNA, 779 bp, Glycine max
  misc_feature: Ceres CLONE ID no. 1653033
  misc_feature: Ceres CDNA ID no. 35383509
  CDS (34)..(408): REFERENCED BY SEQ ID NO: 10640
acaaaacaatctcatttaaaatctcatcatataatggcttgtagaccttcttctttccttgcacttcttctcatcaccactatccttcttgccactacatggcaagcagttgctagacgccacattggtccaaaacactcaaacaatggggacaagaaagagcctcagtttttgttccctcctgaaggtaatttccattttcctggctttgggggagtagggttgccacctttctttgggtttacacctcaaaacccaaacactggtggtagtggactagggtcaggaccagctggtcgtggttacgttccaggtggtgatgacacgtttgtcccaaaccctggttttgaggttccaaaccctgggagtggtggtggagttccagttccagttccagttaatccgtgagtgctctcaatcatgatgaggcatcatgcattttttgcatgattgcactagttaaggttgtgcagtttccaagcccgttatgcttttgacaaatagaagtactagtctactgtttttttgtatccgtgaataagtaagtagttctctgtgtgtactttatctgctattcgtatgcagagcctctctgctcttttcttgtttggaatgaaatttaagcatgctgtaatgctggttgtattcgttgctttcaattactactgctagtgcctcattatatatatatgtgtgtgtgtaatttcttaagatatcctattatctttctaattggttcccgaaccaatatcttagaacaaaaaaaaaaaaaaaaaaaa

SEQ ID NO: 10640 - protein, 124 aa, Glycine max; identical to SEQ ID NO: 10458
  misc_feature: Ceres CLONE ID no. 1653033
  misc_feature: Ceres CDNA ID no. 35383509
  misc_feature: Homolog of GI Number: 21554333 NR Desc: putative cell wall protein
  misc_feature: Homolog of GI Number: 475046 NR Desc: putative cell wall protein
  misc_feature: Homolog of GI Number: 6851364 NR Desc: putative cell
  misc_feature: Homolog of GI Number: 6851366 NR Desc: putative cell

SEQ ID NO: 10641 - DNA, 822 bp, Glycine max
  misc_feature: Ceres CLONE ID no. 1653064
  misc_feature: Ceres CDNA ID no. 35383510
  CDS (252)..(686): REFERENCED BY SEQ ID NO: 10642
gccatatgttacactgtttctctcgttgttaattgttattggccaagaattgagaagtggataagcttatctatctccaaatcacgtgtgacctcaggaatgaatttccaaatctggtgaagtggaagtagctggccacgtggacacatgagctccaagtaacagaaacagctatattccccattgatcagctgatactaaattactgatacaggaacagcagagaaacaaagttagaagtaaagaagatcatggcttctctagcaaccttggctgctgttcaaccagctacgatcaatggccttgctggaagttccctctctggaactaagctctctttcaagccctctcgccacagtgtcaaatccaagaacttcaggagtggtgccgtggtagcaaagtatggtgacaagagtgtgtactttgatttggaggatctgggcaacactacagggcagtgggacttgtatggctcagatgcaccttcaccctacaaccctcttcagagcaagttcttcgagacatttgctgctccattcacaaagaggggattgttactcaagtttctgatattgggaggtggttccacccttgcatacttcagtgcaactgcctcaggtgacattctaccaatcaagaagggaccacaactcccaccaaagctcggtcctcgtggcaagatctaatttgatttgtatcagaactccatctattgagttcctttttaattattttttttctggtttgcataatgtgtaagtatacttacagactactattcaaagatgcttctttcccgtctaaaaaaaaaaaaaaaaaaaa

SEQ ID NO: 10642 - protein, 144 aa, Glycine max; identical to SEQ ID NO: 4208
  misc_feature: Ceres CLONE ID no. 1653064
  misc_feature: Ceres CDNA ID no. 35383510
  misc_feature (6)..(144): Pfam Name: PSI_PsaH PFAM Desc: Photosystem I reaction centre subunit VI
  misc_feature: Homolog of GI Number: 33520419 NR Desc: photosystem I psaH protein
  misc_feature: Homolog of GI Number: 407355 NR Desc: PSI
  misc_feature: Homolog of GI Number: 407353 NR Desc: PSI
  misc_feature: Homolog of GI Number: 397555 NR Desc: photosystem I psaH protein
  misc_feature: Homolog of GI Number: 21553440 NR Desc: Photosystem I reaction center subunit VI
  misc_feature: Homolog of GI Number: 21618081 NR Desc: photosystem I subunit VI precursor
  misc_feature: Homolog of GI Number: 21287 NR Desc: psaH
  misc_feature: Homolog of GI Number: 1916350 NR Desc: PSI
  misc_feature: Homolog of GI Number: 445928 NR Desc: photosystem I:SUBUNIT=PS I
  misc_feature: Homolog of GI Number: 445929 NR Desc: photosystem I:SUBUNIT=PS I
  misc_feature: Useful for making plants with increased biomass and foliage

SEQ ID NO: 10643 - DNA, 986 bp, Glycine max
  misc_feature: Ceres CLONE ID no. 1653203
  misc_feature: Ceres CDNA ID no. 36707576
  CDS (204)..(698): REFERENCED BY SEQ ID NO: 10644
aatcattctccgttaagattctttcctctttccactctcgttcttatcttcttcccaaacccacaaccactccttattataaatcaggaatcatccaaactgcttgaaatattcatcatcaacaacctcacgctgttatagatattctctctctctctctccctctctctctctctcacacacacacacacacagatccagacatggccgaagaacaccgatgccaagctcccgaaggtcacagactctgctccaacaactgcggtttctttggtagccccgccaccatgaatctctgttccaaatgctacagagacatccgtttgaaggaagaagaacaagccaaaaccaaatccacaatcgaaaccgctctttcaggatcttcctccgccaccgtcaccgcaaccgccgtcgttgcctcctccgtggaatccccttcggcgccggttgaatccctccctcaaccaccggtgctgatttcgccggatatagccgcaccggttcaggcgaaccggtgcggcgcgtgtaggaagcgcgtggggttgacagggttcaagtgcaggtgcggaacaacgttttgtgggagccacaggtaccccgagaaacacgcgtgtggcttcgatttcaaggcggtggggagagaggagatagcacgggcgaatcccgtgatcaaaggcgagaagctacggaggatttaatctgcgccgttggatgatcgaagcgattagggtgagttgatcaggaccgttcgtcgtggaccgttgatacgaaccgatttcgagcgtgtaaaaaaaaaaaaatctattattatgacgacattgggaagggttgaataagtcatattttggtggctttggtttgtgtttgtgcattaaaagtggaaaaatgttaggtccacccacgttcggaaattgaggggtttagaattgaaatgaaatgtaaaaaagtttagtttgattatttttcaaaaaaaaaaaaaaaaaaaa

SEQ ID NO: 10644 - protein, 164 aa, Glycine max
  misc_feature: Ceres CLONE ID no. 1653203
  misc_feature: Ceres CDNA ID no. 36707576
  misc_feature (105)..(145): Pfam Name: zf PFAM Desc: AN1
  misc_feature (13)..(37): Pfam Name: zf PFAM Desc: A20
  misc_feature: Homolog of GI Number: 7669954 NR Desc: zinc finger
  misc_feature: Homolog of GI Number: 18377546 NR Desc: zinc finger
  misc_feature: Homolog of GI Number: 50909195 NR Desc: putative multiple stress
  misc_feature: Homolog of GI Number: 23198266 NR Desc: putative zinc finger protein
  misc_feature: Homolog of GI Number: 8778645 NR Desc: F5O11.17
  misc_feature: Homolog of GI Number: 73921296 NR Desc: Zinc finger A20 and AN1 domains containing protein At4g12040
  misc_feature: Homolog of GI Number: 38566602 NR Desc: At1g12440
  misc_feature: Homolog of GI Number: 57899571 NR Desc: zinc finger protein 216
  misc_feature: Homolog of GI Number: 50946101 NR Desc: putative zinc finger protein
  misc_feature: Homolog of GI Number: 55241125 NR Desc: ENSANGP00000011823
MAEEHRCQAPEGHRLCSNNCGFFGSPATMNLCSKCYRDIRLKEEEQAKTKSTIETALSGSSSATVTATAVVASSVESPSAPVESLPQPPVLISPDIAAPVQANRCGACRKRVGLTGFKCRCGTTFCGSHRYPEKHACGFDFKAVGREEIARANPVIKGEKLRRI

SEQ ID NO: 10645 - DNA, 867 bp, Glycine max
  misc_feature: Ceres CLONE ID no. 1653211
  misc_feature: Ceres CDNA ID no. 35383511
  CDS (1)..(645): REFERENCED BY SEQ ID NO: 10646
agttctagctataccgttccttctgctactactcaactgcaaaggatggtgctgcccaagttctctctgtgcttctggcttctcctttcttcacttgtgattctcttaataaattgtccagttaaatgtgacgatgatgaggaagacaatctctatcaaggtatcaacaagtatcgagcatcgttaaacttgaaagctctaacaaggaatgataatgcaaattgccttgccgaaaaactagctaaccaattcaagaaacaaccctgcacaaataccacaggtgctaacactgtacctggcacagaacctcagttttccaactatccagaccttttatccaagtgtgacttggctatttccaacacaagggatggaaatgtaatgcctgcctgtgttcctggcctggttccaagtcttgtccttgctaatttcaccaaatctctctactctgatagtctcaacgacacaaagtatacaggaattggtattggttcagaagataactggattgttgtggtcttgaccactaacactccttcaggaacctttgctccctatagttctaatggtgtcaatttgatttctaaatctggattgatttactgctcagtgctcttcttagttggttacattttgctgttatgaaacaaggaggttggctgttggaatgtttcatggttacaattttgttaccaatcaaatgtattgcttgtttcagggtgagcttaacgaagacatctgcttttctagtaggaaattgggaggtccttttgtaactgttgttttggtattgtaattctatagaaagcaagagacaaatggaagaaagaaagcattattcctaaaggattgtaaaaaaaaaaaaaa

SEQ ID NO: 10646 - protein, 199 aa, Glycine max
  misc_feature: Ceres CLONE ID no. 1653211
  misc_feature: Ceres CDNA ID no. 35383511
  misc_feature: Homolog of GI Number: 50198884 NR Desc: At5g19250
  misc_feature: Homolog of GI Number: 28416609 NR Desc: At5g19240
MVLPKFSLCFWLLLSSLVILLINCPVKCDDDEEDNLYQGINKYRASLNLKALTRNDNANCLAEKLANQFKKQPCTNTTGANTVPGTEPQFSNYPDLLSKCDLAISNTRDGNVMPACVPGLVPSLVLANFTKSLYSDSLNDTKYTGIGIGSEDNWIVVVLTTNTPSGTFAPYSSNGVNLISKSGLIYCSVLFLVGYILLL

SEQ ID NO: 10647 - DNA, 1558 bp, Glycine max
  misc_feature: Ceres CLONE ID no. 1653503
  misc_feature: Ceres CDNA ID no. 40041536
  CDS (536)..(1438): REFERENCED BY SEQ ID NO: 10648
tttaatttcatttcatttcggttccgtagaagacgtggttggtgcttacgcttacttacaacttacaatcttagcttttggctgcgcataagttttaacgttccttccttggatccttgcctcttcactccgcgtcctctatcataaacttgggaggtaagatagtgtatctatgacttaagattaagactttaccccttccaagaagaattttccattagcctagagcgtgtctttcggggcctaaaatatactagtggagtattatctttatcacaacgtcaccttcataaatggaaggacacgcctttcccagaacctgcatggtccatcttcttgttccatagtttcttagctaacaaaaatttacacaaactagtgtccctccgacagcactttcttccttaataactccaaaaactttggtacctttcaatcaaccaccgaaaagttagggactttaatttttttaatttttttttttatatgaagatgtgtgattgatcgattccctagtgaaggggtaaggggggtcatgtctttcggtgggttaagtattgctttgagtcttgtctttgggtgtcttctgctggctctgtgtgctcagctttactatttcttatggtggaagaagagaaggacacagatggatattgagatggatgcaaagggtgcgttttattgggggtgctggaagaccccttgtgccatgcatgttgcaaacaacactggaagagggggtgtgaatagggacatagaaagaacaacaacaagtcgtgagccagagatggagttggatttgctgcacaagccctttggagaagagggtactgttgagtcagagttgatgaggctgcacaatctggctggcccaccaaggtttctcttccccatcaaagaggaaactaaagaagatttggagtctgaagataggagcagaaaggggtcaagaacaaggagtttgagtgatctcatgttgacaattgacaccccctttcttacccctgtggcttcctcgcctttgaagtgttgttctttgcctttggaccctcttcattcttataagcatcaaggattcaaccctctctttgaatcctccgtggaattagagtacaacaggtttagatcttcgccacctccgaaattcaagttcatgagggacgcggaagagaagttgcataggaaattgatggaagaggcgaggagaaaggctgtggataataataatgtccaagaatgtggggttaaagattgttctaatgaaacattggccacagattttagagatgggtcctttcttaagttcattcaaacaacagaacacaaacagcctcaacaatatctaccacagtttccttcaggttcatctcagattctcccattggcatcttctcctacaactttgagaccacttgaaaaggcatccattgtgcattagtttttagttccatacaactaggcttctgtttttttttttttcatattatgttaatcagattaatttttctaaatgactctgctaattcttaatgttttacaaaaaaaaaaaaaaaaaaaa

SEQ ID NO: 10648 - protein, 300 aa, Glycine max
  misc_feature: Ceres CLONE ID no. 1653503
  misc_feature: Ceres CDNA ID no. 40041536
MSFGGLSIALSLVFGCLLLALCAQLYYFLWWKKRRTQMDIEMDAKGAFYWGCWKTPCAMHVANNTGRGGVNRDIERTTTSREPEMELDLLHKPFGEEGTVESELMRLHNLAGPPRFLFPIKEETKEDLESEDRSRKGSRTRSLSDLMLTIDTPFLTPVASSPLKCCSLPLDPLHSYKHQGFNPLFESSVELEYNRFRSSPPPKFKFMRDAEEKLHRKLMEEARRKAVDNNNVQECGVKDCSNETLATDFRDGSFLKFIQTTEHKQPQQYLPQFPSGSSQILPLASSPTTLRPLEKASIVH

SEQ ID NO: 10649 - DNA, 1021 bp, Glycine max
  misc_feature: Ceres CLONE ID no. 1653784
  misc_feature: Ceres CDNA ID no. 35383512
  CDS (227)..(889): REFERENCED BY SEQ ID NO: 10650
atgggaggctccgccctaactgaaactcaaaaggtagcataagcgttagcattgctttccaacttgcacttttgcagcctttattaacttcaacttcattgtttctgtcgccttccttcgctttgcttttaacgttaacttgcaattgcataaactttcgataactacgtgctcacgcttcaattccaagctgtggtgtggtttttcacttcacgcttcaaacccaatggcagcctcagctctctccaacagattggtttcacccatttctcttccatccaaacccaaacccaaagccatttccttgcaacccaaattttcacttgtcaaattccccaacaccagattccatcccttgtcgaggaaaacgacgtcgctcaccacgttttgttcctccgatgctcctcagcatgacaccccaattgaattaaggtatccagcattcccaaccgtcatggacatcaaccagattcgtgacattttgcctcacaggtttccttttcttctggtggatagagtgattgaatacaatcctggagtttctgcagtggctataaagaatgtgacaataaatgacaacttctttcctggacattttccagaaaggcccatcatgcctggtgttctaatggttgaggcaatggcacaagttggtggtttggtcatgttgcaacctgaagtgggaggctctcgtgaaaacttcttctttgctggaatagacaaagtgcggtttcgtaagcctgtgattgctggggacaccttagttatgagaatgacacttactaagctgcaaaagcgatttggaatagcaaagatggaagggaaggcatatgttggaggcgaagttgtgtgtgagggtgaatttttgatggcgatggggagcgaataagtagacatgctccttccaattggaagagtttattttcttacatctttaattaaattattctgctttttaatgcagaacattgtgaacatttaatttaatgtatgcattttcaatgaaaaaaaaaaaaaaaaa

SEQ ID NO: 10650 - protein, 220 aa, Glycine max
  misc_feature: Ceres CLONE ID no. 1653784
  misc_feature: Ceres CDNA ID no. 35383512
  misc_feature (86)..(212): Pfam Name: FabA PFAM Desc: FabA
  misc_feature: Homolog of GI Number: 72384415 NR Desc: 4D11_17
  misc_feature: Homolog of GI Number: 27808536 NR Desc: At5g10160
  misc_feature: Homolog of GI Number: 14334124 NR Desc: putative 3
  misc_feature: Homolog of GI Number: 72384436 NR Desc: 52O08_29
  misc_feature: Homolog of GI Number: 72255615 NR Desc: 117M18_14
  misc_feature: Homolog of GI Number: 21928166 NR Desc: At2g22230/T26C19.11
  misc_feature: Homolog of GI Number: 21592599 NR Desc: putative beta
  misc_feature: Homolog of GI Number: 50931539 NR Desc: putative beta
  misc_feature: Homolog of GI Number: 25319393 NR Desc: probable beta
  misc_feature: Homolog of GI Number: 55792520 NR Desc: plastid beta
MAASALSNRLVSPISLPSKPKPKAISLQPKFSLVKFPNTRFHPLSRKTTSLTTFCSSDAPQHDTPIELRYPAFPTVMDINQIRDILPHRFPFLLVDRVIEYNPGVSAVAIKNVTINDNFFPGHFPERPIMPGVLMVEAMAQVGGLVMLQPEVGGSRENFFFAGIDKVRFRKPVIAGDTLVMRMTLTKLQKRFGIAKMEGKAYVGGEVVCEGEFLMAMGSE

SEQ ID NO: 10651 - DNA, 896 bp, Glycine max
  misc_feature: Ceres CLONE ID no. 1653806
  misc_feature: Ceres CDNA ID no. 40041537
  CDS (110)..(757): REFERENCED BY SEQ ID NO: 10652
cgagtgagcttagcggaattcttcaaatttttggtttttgtgattttgataggacgaccctttggtgtttggatcttcaagaaagagagacccttgggatttcgtcaccatgagtctcttcggtcttggaaacagaaaccaaaaaacatttcgtccaaaaaagagtgctccatctggaagtaagggtgctcaacttcaaaaacacatcgatgccacgttgggtagtgggaacttgagggaggctgttaaactgcctcccggtgaagatattaatgaatggctagctgtaaacaccgtggacttctttaatcaagtgaatatcctgtttggtactcttacagaattctgcacgccaagtaactgcccttcaatgactgcaggaccaaagtatgagtatcgatgggctgatggtgttactataaagaaaccaatagaggtgtctgctccaaaatatgttgagtatttgatggactggattgaatctcagctagatgatgaaacgattttccctcaaagattgggggctccctttccaaccaatttccgagatgttgtcaagacaattttcaagcgattattccgtgtatatgctcacatttaccactcacattttcagaaaatagtgagtttgaaggaagaagctcaccttaatacttgcttcaagcattttgttttatttacttgggaattccgtttgatcgacaaagcagagttggcacctcttgaggaccttgttgaatctattgttcagttatagtgctgttggtgttttctttccctaatttttaggagagattaaacattggaaatgttggctatacatttttgtgaccccttgtaaaatacttgctaaatgaaaaatctttatcaacccccaaaaaaaaaaaaaaaaaaaa

SEQ ID NO: 10652 - protein, 215 aa, Glycine max
  misc_feature: Ceres CLONE ID no. 1653806
  misc_feature: Ceres CDNA ID no. 40041537
  misc_feature (30)..(206): Pfam Name: Mob1_phocein PFAM Desc: Mob1/phocein family
  misc_feature: Homolog of GI Number: 19309913 NR Desc: Mob1
  misc_feature: Homolog of GI Number: 82734181 NR Desc: Mob1
  misc_feature: Homolog of GI Number: 32470635 NR Desc: putative Mob1/phocein family protein
  misc_feature: Homolog of GI Number: 38093736 NR Desc: putative Mob1
  misc_feature: Homolog of GI Number: 62147661 NR Desc: Mob1
  misc_feature: Homolog of GI Number: 37534032 NR Desc: putative F
  misc_feature: Homolog of GI Number: 73975379 NR Desc:  similar to Mps one binder kinase activator
  misc_feature: Homolog of GI Number: 76155534 NR Desc: SJCHGC05643 protein
  misc_feature: Homolog of GI Number: 66853209 NR Desc: protein kinase regulator
MSLFGLGNRNQKTFRPKKSAPSGSKGAQLQKHIDATLGSGNLREAVKLPPGEDINEWLAVNTVDFFNQVNILFGTLTEFCTPSNCPSMTAGPKYEYRWADGVTIKKPIEVSAPKYVEYLMDWIESQLDDETIFPQRLGAPFPTNFRDVVKTIFKRLFRVYAHIYHSHFQKIVSLKEEAHLNTCFKHFVLFTWEFRLIDKAELAPLEDLVESIVQL

SEQ ID NO: 10653 - DNA, 772 bp, Glycine max
  misc_feature: Ceres CLONE ID no. 1654082
  misc_feature: Ceres CDNA ID no. 40041538
  CDS (57)..(602): REFERENCED BY SEQ ID NO: 10654
atagtcatgaatctatcataactcttcctttccttttatcgtttcatccagaaaacatggatgccatgacactgtcactcccgctccctccggttccggtctgtacagtgcccgcgtctgcatcaacctcgtcctctgtttctctcactcactcctggtcggccacggccaggcagaggctctcctctcacagaacaagacccattttccggaattattcctctgcggttccaaaacttacagtggtgacatgcggtgcggctgtgacggagatcaacgagacccaattcaaagacacggttctgaaggctaaccgtccggttcttgttgagttcgtcgctacttggtgcggtccttgccgtctcatctccccctctatggaatccctcgctaaggaatatgaagacagattaacggttgtaaagattgatcatgatgccaacccacggctaattgaagagtataaagtttatggactaccaacattaatactcttcaagaacgggcaagaagttccagaaagcagaagggaaggtgcaattacaaaagtgaaacttaaagagtacgtggatgctctattggaatcgatatcagtttcatagtcatcatattcatatatgtttcaaagttctgacctgttctgggagacttgagatataggagcatatctgtttgtttccatatccttgtattgtatgaaacagtttaacaggcttatacagttgtataatctatataatttctgaagctgtaaaaaaaaaaaaaaaaaaaa

SEQ ID NO: 10654 - protein, 178 aa, Glycine max
  misc_feature: Ceres CLONE ID no. 1654082
  misc_feature: Ceres CDNA ID no. 40041538
  misc_feature (66)..(173): Pfam Name: Thioredoxin PFAM Desc: Thioredoxin
  misc_feature: Homolog of GI Number: 5734774 NR Desc: Similar to thioredoxin
  misc_feature: Homolog of GI Number: 6539616 NR Desc: thioredoxin x
  misc_feature: Homolog of GI Number: 21592332 NR Desc: thioredoxin
  misc_feature: Homolog of GI Number: 50929617 NR Desc: OSJNBa0064G10.1
  misc_feature: Homolog of GI Number: 27763685 NR Desc: thioredoxin x
  misc_feature: Homolog of GI Number: 78212139 NR Desc: thioredoxin
  misc_feature: Homolog of GI Number: 56752309 NR Desc: thioredoxin
  misc_feature: Homolog of GI Number: 81300602 NR Desc: thioredoxin
  misc_feature: Homolog of GI Number: 48862425 NR Desc: COG0526: Thiol
  misc_feature: Homolog of GI Number: 41410438 NR Desc: TrxC
  misc_feature: Useful for increasing chlorophyll and photosynthetic capacity
  misc_feature: Useful for making plants with increased biomass and foliage
MTLSLPLPPVPVCTVPASASTSSSVSLTHSWSATARQRLSSHRTRPIFRNYSSAVPKLTVVTCGAAVTEINETQFKDTVLKANRPVLVEFVATWCGPCRLISPSMESLAKEYEDRLTVVKIDHDANPRLIEEYKVYGLPTLILFKNGQEVPESRREGAITKVKLKEYVDALLESISVS

SEQ ID NO: 10655 - DNA, 636 bp, Glycine max
  misc_feature: Ceres CLONE ID no. 1654099
  misc_feature: Ceres CDNA ID no. 36706864
  CDS (63)..(473): REFERENCED BY SEQ ID NO: 10656
aaaacaaatagagaaaacacaaaaagttctgttctttttcccacccaattcagttttctcaaatggctcgtacgaagcaaacggctcgcaagtccaccggcggcaaggcgccacgtaagcagctggccaccaaggcggctcgtaagtctgctccggctaccggcggcgtgaagaagccgcacagattccgtccgggaaccgtagcgctccgcgagatccggaagtaccagaagagcacggaacttctgatccggaagctcccgttccagcgattggtccgtgagatcgcgcaggacttcaagaccgaccttcgatttcagagctccgccgtctccgccctccaggaagccgccgaggcctacttggttggtctcttcgaagacaccaatctctgcgctattcacgccaagcgtgtcactatcatgcccaaggatattcaactcgctaggcgtattaggggcgagcgcgcttaaatctaattattgattctctgtatagacgatttcaatttcaagcgttcttagttagaacttttgatttggttttcttgttgttgaggattctgtaatgctgctgtgatgttaacgctttattaatgaaattatcactttttgtcttcaaaaaaaaaaaaaaaaa

SEQ ID NO: 10656 - protein, 136 aa, Glycine max; identical to SEQ ID NO: 588
  misc_feature: Ceres CLONE ID no. 1654099
  misc_feature: Ceres CDNA ID no. 36706864
  misc_feature (58)..(134): Pfam Name: Histone PFAM Desc: Core histone H2A/H2B/H3/H4
  misc_feature: Homolog of GI Number: 59799581 NR Desc: Histone H3
  misc_feature: Homolog of GI Number: 166384 NR Desc: histone H3
  misc_feature: Homolog of GI Number: 74004208 NR Desc:  similar to histone 1
  misc_feature: Homolog of GI Number: 50729226 NR Desc:  similar to histone protein Hist2h3c1
  misc_feature: Homolog of GI Number: 68441481 NR Desc:  similar to CG31613
  misc_feature: Homolog of GI Number: 1362108 NR Desc: histone H3 homolog
  misc_feature: Homolog of GI Number: 50960584 NR Desc: HIST2H3C protein
  misc_feature: Homolog of GI Number: 55775689 NR Desc: histone 3
  misc_feature: Homolog of GI Number: 57098927 NR Desc:  similar to histone protein Hist2h3c1
  misc_feature: Homolog of GI Number: 55626038 NR Desc:  similar to HIST2H3C protein

SEQ ID NO: 10657 - DNA, 966 bp, Glycine max
  misc_feature: Ceres CLONE ID no. 1654237
  misc_feature: Ceres CDNA ID no. 25891738
  CDS (163)..(879): REFERENCED BY SEQ ID NO: 10658
accatgataggaactccaataagcaaaagccaattgatacgtgcatatcacaaaactactcttaaacacacacacaccccaaaaaatcctctatcaccaaactcacctatttcctcaactcaaggccctatagtcccagcaagtgagtgagcgtcacacaacatggaatatacttattcagcaggtgtagaggcagaaactcacacaagtagcagcaccaccccatcaagatcaaagaagagaaacaacaacacaagaaggttcagtgatgaacaaatcaaatcattggagaccatgtttgaatcagagtcaaggcttgagcctagaaagaagttgcagctggccagagagcttggattgcagccaaggcaagttgctatatggtttcagaacaagagggctaggtggaagtcaaagcaacttgagagagactatggcatactccaatccaattacaacagtttggcttcccgttttgaagctcttaagaaggaaaatcaaacattactaattcagctgcagaagctgaatcatctaatgcagaagccaatggagccaggtcagagatgcacacaagttgaagcagcaaacagcatggacagtgaatcagaaaatggaggcaccatgaaatgtgaagctgagggaaagccaagcccatcaatggaaatatcagaacatttacttggtgttctgtctgatgatgacacaagcataaaggtggaagactttggcctagaagatgaacatggccttctgaattttgctaagcatgttgatggttccttgacttcaccagaagattggaatgcttttgaatccaatgatctattaggccaatcaaccactgatgattaccaatggtgggacttctggtcctgaatgaaacagagcaaccaaaattttgtggaggaaatatttatgcatatgaatgcttcatgtttggttctaaaaaaaaaaaaaaaaaaa

SEQ ID NO: 10658 - protein, 238 aa, Glycine max
  misc_feature: Ceres CLONE ID no. 1654237
  misc_feature: Ceres CDNA ID no. 25891738
  misc_feature (30)..(84): Pfam Name: Homeobox PFAM Desc: Homeobox domain
  misc_feature (85)..(129): Pfam Name: HALZ PFAM Desc: Homeobox associated leucine zipper
  misc_feature: Homolog of GI Number: 21592794 NR Desc: homeobox
  misc_feature: Homolog of GI Number: 3153207 NR Desc: ATHB
  misc_feature: Homolog of GI Number: 79324931 NR Desc: ATHB
  misc_feature: Homolog of GI Number: 20259175 NR Desc: putative homeodomain transcription factor protein ATHB
  misc_feature: Homolog of GI Number: 5031277 NR Desc: homeobox leucine zipper protein
  misc_feature: Homolog of GI Number: 37147908 NR Desc: HD
  misc_feature: Homolog of GI Number: 5006857 NR Desc: homeodomain leucine zipper protein
  misc_feature: Homolog of GI Number: 52077331 NR Desc: putative homeodomain leucine zipper protein
  misc_feature: Homolog of GI Number: 22651698 NR Desc: homeodomain protein Hfi22
  misc_feature: Homolog of GI Number: 49659431 NR Desc: SlHDL1
MEYTYSAGVEAETHTSSSTTPSRSKKRNNNTRRFSDEQIKSLETMFESESRLEPRKKLQLARELGLQPRQVAIWFQNKRARWKSKQLERDYGILQSNYNSLASRFEALKKENQTLLIQLQKLNHLMQKPMEPGQRCTQVEAANSMDSESENGGTMKCEAEGKPSPSMEISEHLLGVLSDDDTSIKVEDFGLEDEHGLLNFAKHVDGSLTSPEDWNAFESNDLLGQSTTDDYQWWDFWS

SEQ ID NO: 10659 - DNA, 1176 bp, Glycine max
  misc_feature: Ceres CLONE ID no. 1654289
  misc_feature: Ceres CDNA ID no. 36707467
  CDS (54)..(983): REFERENCED BY SEQ ID NO: 10660
aaaacattcttcagttctaagaaaccttaaaaaacaagtagtgttccgaaaagatggctcagcaggaagtggtagaagggttcaagttcgaacagaggcacgggaaagagcgcgtgagagtggcgcgcgtgtggaagacgaggcaggggcagcacttcgttgtggagtggcgcgtgggcatcactctcttctcagactgcgtcaactcgtatctccgcgatgacaactctgacatcgttgctactgataccatgaaaaacacagtgtatgcaaaagcaaaggaatgctcagacatactttctgctgaggactttgctattttgcttgctaagcactttgtatcattttacaagaaggttactggtgctattgtgaatattgtggaaaaaccatgggagcgtgtcattgtggatggtcaacctcatgaacatggtttcaaacttgggtctgagaagcatacaacagaggcaatagtacaaaagtctggttcacttcagttgacttctggtattgaaggattgtcagtgttgaagacaacccagtctggttttgtgaatttcataagagacaagtacacagcacttcctgatacccgtgaaaggattctggcaacagaagtaaccgcactgtggaggtattcgtatgaatcacagtatagcctccctcagaagccactttactttacagaaaagtatcaggaagtgaaaaaagttctggctgacactttttttggcccaccaaatgggggagtctatagcccatctgttcaaaacacactctacctgatggcaaaggccacactgaacagatttcctgacatagcttatgtcagtctaaagatgccaaatcttcatttcttacctgtcaatatctcaaacaaggatggtcctattgtgaagtttgaggatgatgtgtacttgccaacggatgagcctcatgggtcaattcaagctagcttgagccgcctttggtcaaagctgtagaaactgcagaagctatggtgctcatcccttctgtggtggattgccagtgcagcctaaaataccgaacctggccttagagatagtgctttccattaatgtgtcttgtaattctggtttttgtcatcgttgtatttgtttcgtggagaactattatgcatgaataacttccaggagggaaaaaaaaaaaaaaaaa

SEQ ID NO: 10660 - protein, 309 aa, Glycine max
  misc_feature: Ceres CLONE ID no. 1654289
  misc_feature: Ceres CDNA ID no. 36707467
  misc_feature (13)..(142): Pfam Name: Uricase PFAM Desc: Uricase
  misc_feature: Homolog of GI Number: 6175091 NR Desc: Uricase II
  misc_feature: Homolog of GI Number: 549169 NR Desc: Uricase II isozyme 1
  misc_feature: Homolog of GI Number: 6136152 NR Desc: Uricase II isozyme 2
  misc_feature: Homolog of GI Number: 170031 NR Desc: nodulin 35
  misc_feature: Homolog of GI Number: 1944193 NR Desc: nodulin 35
  misc_feature: Homolog of GI Number: 81803 NR Desc: urate oxidase
  misc_feature: Homolog of GI Number: 1498172 NR Desc: uricase
  misc_feature: Homolog of GI Number: 432629 NR Desc: uricase II
  misc_feature: Homolog of GI Number: 170033 NR Desc: uricase II subunit
  misc_feature: Homolog of GI Number: 1498170 NR Desc: uricase
MAQQEVVEGFKFEQRHGKERVRVARVWKTRQGQHFVVEWRVGITLFSDCVNSYLRDDNSDIVATDTMKNTVYAKAKECSDILSAEDFAILLAKHFVSFYKKVTGAIVNIVEKPWERVIVDGQPHEHGFKLGSEKHTTEAIVQKSGSLQLTSGIEGLSVLKTTQSGFVNFIRDKYTALPDTRERILATEVTALWRYSYESQYSLPQKPLYFTEKYQEVKKVLADTFFGPPNGGVYSPSVQNTLYLMAKATLNRFPDIAYVSLKMPNLHFLPVNISNKDGPIVKFEDDVYLPTDEPHGSIQASLSRLWSKL

SEQ ID NO: 10661 - DNA, 886 bp, Glycine max
  misc_feature: Ceres CLONE ID no. 1654788
  misc_feature: Ceres CDNA ID no. 25891815
  CDS (46)..(717): REFERENCED BY SEQ ID NO: 10662
actcactcactctgcactcaccactgccacacttcaatcgcactaatggctgtcaccttctcagatctacacaccgaagagggcatcaaatccctcgatcaattcctttctgggaaaacctatatttctggggatcagttgacaaaggatgatattaaagtgtatgcagctgttgttgaaaagccaggggacacttttcctaatgctgccaagtggtacgatgctgtctcttctcaacttgctccaagctttcctggccacgctcaaggggtaagattcagtggcgctgctgctccagctgaagctgcacctgccaaagcggctgccactgctgaagaagatgatgatgatcttgatctctttggtgatgagacagaggaagataagaaggcagcagaggaaagggaggctgctaaaaagcctgccaagaaaaaagagagtggcaagtcttctgtccttctcgatgttaagccttgggatgatgagaccgacatgaagaagctggaagagactgtccgcagtattgagatgcctggtttattgtggggagcatccaaactggttcctgtgggatatgggatcaagaagttgcagatcatgatgactattgttgatgaccttgtatccgtggacacccttgttgaggaacgcttgacagttgagccatgcaacgagtatatccagagctgtgacattgttgcattcaacaaaatttaagttttcttgtttattttgattttagccattttcaagcggctgatcagtctgttactcttcctttcattgttcatgtttggtctctttcaatagtggttttgttgcaaaaattgtgagaagtaaaagcaatatattagggtgtgtttggtttaaaaaaaaaaaaaaaaaa

SEQ ID NO: 10662 - protein, 223 aa, Glycine max
  misc_feature: Ceres CLONE ID no. 1654788
  misc_feature: Ceres CDNA ID no. 25891815
  misc_feature (134)..(223): Pfam Name: EF1_GNE PFAM Desc: EF
  misc_feature: Homolog of GI Number: 48209911 NR Desc: putative elongation factor
  misc_feature: Homolog of GI Number: 77416959 NR Desc: putative elongation factor 1B alpha
  misc_feature: Homolog of GI Number: 76161000 NR Desc: elongation factor
  misc_feature: Homolog of GI Number: 15810631 NR Desc: putative elongation factor 1B alpha
  misc_feature: Homolog of GI Number: 9759378 NR Desc: elongation factor 1B alpha
  misc_feature: Homolog of GI Number: 50882147 NR Desc: putative translation elongation factor eEF
  misc_feature: Homolog of GI Number: 218161 NR Desc: elongation factor 1 beta'
  misc_feature: Homolog of GI Number: 218341 NR Desc: elongation factor 1 beta'
  misc_feature: Homolog of GI Number: 27754711 NR Desc: putative elongation factor 1B alpha
  misc_feature: Homolog of GI Number: 1841870 NR Desc: elongation factor 1
MAVTFSDLHTEEGIKSLDQFLSGKTYISGDQLTKDDIKVYAAVVEKPGDTFPNAAKWYDAVSSQLAPSFPGHAQGVRFSGAAAPAEAAPAKAAATAEEDDDDLDLFGDETEEDKKAAEEREAAKKPAKKKESGKSSVLLDVKPWDDETDMKKLEETVRSIEMPGLLWGASKLVPVGYGIKKLQIMMTIVDDLVSVDTLVEERLTVEPCNEYIQSCDIVAFNKI

SEQ ID NO: 10663 - DNA, 725 bp, Glycine max
  misc_feature: Ceres CLONE ID no. 1654883
  misc_feature: Ceres CDNA ID no. 35383513
  CDS (57)..(512): REFERENCED BY SEQ ID NO: 10664
aagcgtgacctagccagcacaaagggcgtaggagaagagggtttcgttccgtttcaatggggagcgaagagcagaacggcgaattctacctgcgttactacgtcggtcacaagggcaagtttggtcacgagttcctggagttcgagttccgcccagacggcaagctccgctacgccaacaactccaactacaaaaacgacaccatcatccgcaaggaggtttacctaacccccgccgttctccgcgagtgccgtcgcatcatcgccgagagcgagattatgaaggaagatgataacaactggcccgaaccggatcgggtggggcggcaggagctcgagattgttatggggaacgagcacatttcgttcaccacgtcgaagattgggtctcttgttgatgttcagagcagtgctgaccccgagggtcttcgcatcttttactatcttgttcaggatttgaagtgctttgtcttctctcttatttcacttcacttcaagatcaagcctatctaatgtgtttgcaataatatgagttcatcctctggggaatatgtactttaacaactatcacttttctgctaatggagttcgacctctgattgagtgactttaatcttgaaatgatttggttctgtatgggtgattacatgaattggaattttaaatttgagggtataacccttgttctaaagtgttgattggtttggtttaaaaaaaaaaaaaaaa

SEQ ID NO: 10664 - protein, 151 aa, Glycine max
  misc_feature: Ceres CLONE ID no. 1654883
  misc_feature: Ceres CDNA ID no. 35383513
  misc_feature (9)..(151): Pfam Name: Mago_nashi PFAM Desc: Mago nashi protein
  misc_feature: Homolog of GI Number: 42565403 NR Desc: mago nashi
  misc_feature: Homolog of GI Number: 12802873 NR Desc: mago nashi
  misc_feature: Homolog of GI Number: 58465200 NR Desc: mago nashi
  misc_feature: Homolog of GI Number: 3123515 NR Desc: Mago Nashi
  misc_feature: Homolog of GI Number: 13195558 NR Desc: mago nashi
  misc_feature: Homolog of GI Number: 57472157 NR Desc: mago
  misc_feature: Homolog of GI Number: 55587094 NR Desc:  similar to mm
  misc_feature: Homolog of GI Number: 73990748 NR Desc:  similar to mago
  misc_feature: Useful for making shorter plants
  misc_feature: Useful for making stronger plants
MGSEEQNGEFYLRYYVGHKGKFGHEFLEFEFRPDGKLRYANNSNYKNDTIIRKEVYLTPAVLRECRRIIAESEIMKEDDNNWPEPDRVGRQELEIVMGNEHISFTTSKIGSLVDVQSSADPEGLRIFYYLVQDLKCFVFSLISLHFKIKPI

SEQ ID NO: 10665 - DNA, 647 bp, Glycine max
  misc_feature: Ceres CLONE ID no. 1655337
  misc_feature: Ceres CDNA ID no. 40041539
  CDS (132)..(461): REFERENCED BY SEQ ID NO: 10666
ccgtaatcaactccctgtgttttttaactgagttctccaatattttcaaattaatttgcaggatttgaaaattgccatatctttgttacccattacaaaatagttccatttttcatttttcaaattaatgcatgaagagaaactgctatctggatcttcgtcttcagtcttcgtcaccttcccatcgttcaatgaatggaacgttgaacatacacaataaccttgtagctattcttcataatggacgccaatgcatttttgacacaacagaacttcaggcaagaatgataatatggttagcaagtaaagaaatggaggaaaacactacaggcttgcattctgaagccctattgatacatgtctcgcgaggcctttccataaagaaatcacttgagaatttcctccagaggagaagaaagaaaaggtctcttgtaacccaaaatgacatgacaaaaatatgaattaattaaatcctcgttcccttctgggggcaggaaaagtctagatctgctggtcagagtggtctgctacatttcttgaatgaagaagggctgatcgccaacccaccatcaccacagctttgttaattgttactgaaacatatataataattcacatttgagtgctttgttaaaaaaaaaaaaaaa

SEQ ID NO: 10666 - protein, 109 aa, Glycine max
  misc_feature: Ceres CLONE ID no. 1655337
  misc_feature: Ceres CDNA ID no. 40041539
MKRNCYLDLRLQSSSPSHRSMNGTLNIHNNLVAILHNGRQCIFDTTELQARMIIWLASKEMEENTTGLHSEALLIHVSRGLSIKKSLENFLQRRRKKRSLVTQNDMTKI

SEQ ID NO: 10667 - DNA, 931 bp, Glycine max
  misc_feature: Ceres CLONE ID no. 1655446
  misc_feature: Ceres CDNA ID no. 35383514
  CDS (48)..(662): REFERENCED BY SEQ ID NO: 10668
accatcgcgcaagggtttacatcggaaaagttggtagcgaaagaaagatgtcgatcttcgagtacaacgggagtgccctagtggctatggtggggaagaactgcttcgccatcgcgagcgatcggagactcggggttcagctccagaccattgccaccgatttccagaggatttcaaaaatccacgacaagctcttcatcggtctctccggcctcgccaccgacgcccagaccctctaccagcgcctccttttccgccacaaattgtatcagctccgcgaagagagggacatgaagccccaaacctttgccagcctagtctccgctattctctacgagaaaaggtttggtccatacttttgccagcctgtaattgctggactaggagatgatgacaaaccattcatttgcacaatggatgccattggagcaaaggaacttgcaaaagattttgtagtggctggcactgcatccgagtctctttatggtgcttgtgagtcaatgtttaagcctgacatggaaccagaagaattgttcgagacaatctcccaagcactgctatcatctgtagatcgtgattgtttaagtggctggggtggacatgtttatgttgtcaccccaaccgaagtaaaggaaaggatactgaaaggaagaatggactaacttttaagcgtgtttgttttgacgtactcctactttccgaggagcctgaacgtgaaaggggaaatttgttggattgacgttcatcaccatttcaaatggaaaaacaaatatgctatgatccaaccaaatcactcttttcttgtcattttgttatcctagtttggatttaattgaaaatcatttaccatcaatttgtgcagacggctatacctttattaactgttagaaagttttactctgtttcagtgttaagcgaaaaaaaaaaaaaa

SEQ ID NO: 10668 - protein, 204 aa, Glycine max
  misc_feature: Ceres CLONE ID no. 1655446
  misc_feature: Ceres CDNA ID no. 35383514
  misc_feature (5)..(189): Pfam Name: Proteasome PFAM Desc: Proteasome A
  misc_feature: Homolog of GI Number: 21387087 NR Desc: proteasome subunit
  misc_feature: Homolog of GI Number: 12744997 NR Desc: putative 20S proteasome beta subunit PBC2
  misc_feature: Homolog of GI Number: 21553663 NR Desc: putative 20S proteasome beta subunit PBC2
  misc_feature: Homolog of GI Number: 19548049 NR Desc: At1g77440/T5M16_3
  misc_feature: Homolog of GI Number: 2982322 NR Desc: probable proteasome subunit
  misc_feature: Homolog of GI Number: 50905713 NR Desc: Proteasome subunit beta type 3
  misc_feature: Homolog of GI Number: 51535468 NR Desc: 20S proteasome subunit beta type 3
  misc_feature: Homolog of GI Number: 14594927 NR Desc: putative beta 3 proteasome subunit
  misc_feature: Homolog of GI Number: 47028283 NR Desc: proteasome beta subunit
  misc_feature: Homolog of GI Number: 50760756 NR Desc:  similar to Zgc:56374
MSIFEYNGSALVAMVGKNCFAIASDRRLGVQLQTIATDFQRISKIHDKLFIGLSGLATDAQTLYQRLLFRHKLYQLREERDMKPQTFASLVSAILYEKRFGPYFCQPVIAGLGDDDKPFICTMDAIGAKELAKDFVVAGTASESLYGACESMFKPDMEPEELFETISQALLSSVDRDCLSGWGGHVYVVTPTEVKERILKGRMD

SEQ ID NO: 10669 - DNA, 1578 bp, Glycine max
  misc_feature: Ceres CLONE ID no. 1655849
  misc_feature: Ceres CDNA ID no. 25891968
  CDS (174)..(1367): REFERENCED BY SEQ ID NO: 10670
atttttgattttcttgtaattttgaaaaaacacagtgaaagtggtggcacggcagcaaaacaagcgacggggaagcacttcctcttccgatttgggaactaaccaaacagatcacagcttctagggttttaggttccgtccaattagcggtttctctctctctctcttcagaaatggataacagtagctcagaacagaccgtgcaagatggcaaactctacagaaacctcaattctctcatcgtcgctcatcttcgcgacaacagtctcactcagggtcttgcagtggaaaagggcgacatcacaagaggcactggtttcactgctacactgcctctgcctcacacaacagctattgatttcagctctgtgcctgatgtgaaaggttcatcaaagagcttcccaaagcatgaaacgcgacacctttcagaacacaagaatattgccagatgtgctaggtttagtgctgatggaagatttgttgccactggaagtgcagatacatcaataaagttatttgaggtttcgaagatcaagcagatgttgctgccagaggcaaaggatggtcctgtgcggcctgtcatacgaacatattatgatcatatacaaccaataaatgatctggattttcatccacaaggtactatcctgatatctggagctaaagatcaaacaataaagttttttgatatttcaaaaacaaatgcaaagagagcatacagggttatccaggacacacacaatgttcgatctgtatcttttcatccatctggagactttctgctggcaggaactgatcatgcaattccacatttgtatgatataaatacctttcagtgctatctgtcggcaaatatcccagagactagccccagtggagccataaaccagatcagatattcttgtacaggttccatgtatgttacagcatctaaagatggtgctattcggttgtgggatggcatcactgccaattgtgtgcgctcaataactgcagcacatggaacagctgaggctaccagtgcaatttttacaaaagatcaaaggtttgttctctcttgcgggaaggattctaccttaaagctttgggaagttggctctggaagattagtcaaacaatatctgggtgctatacatacccagctaaggtgccaggctatttttaatgagacagaagaatttattctatccatagatgaactgagcaatgagatcgttatctgggatgcgatgacaacagaaaaagtagcaaagtggccttctaatcatgttggtgcaccccgctggcttgaacactcaccaatagagtctgcttttatttcctgtggaactgataggtcagttcggttctggaaggaaactgtataattaatgggaaggaggctgaatgcatttacagactaattaaagttatcacttattgaaagttaactctgggaatttccatttatttttctttaatttctagtagtagcctaaggctttttgcctgcagaagtagttaatgcattcagctctcggaattggaagattatctatttctgatgatttgttttgctccaaaaaaaaaaaaaaaaaa

SEQ ID NO: 10670 - protein, 397 aa, Glycine max
  misc_feature: Ceres CLONE ID no. 1655849
  misc_feature: Ceres CDNA ID no. 25891968
  misc_feature (269)..(306): Pfam Name: WD40 PFAM Desc: WD domain
  misc_feature: Homolog of GI Number: 23197952 NR Desc: cleavage stimulation factor 50K chain
  misc_feature: Homolog of GI Number: 10177317 NR Desc: cleavage stimulation factor subunit 1
  misc_feature: Homolog of GI Number: 37718818 NR Desc: putative cleavage stimulation factor
  misc_feature: Homolog of GI Number: 12278523 NR Desc: putative cleavage stimulation factor subunit 1
  misc_feature: Homolog of GI Number: 21326112 NR Desc: putative cleavage stimulation factor subunit 1
  misc_feature: Homolog of GI Number: 18496652 NR Desc: putative cleavage stimulation factor subunit 1
  misc_feature: Homolog of GI Number: 42573752 NR Desc: transducin family protein / WD
  misc_feature: Homolog of GI Number: 73992321 NR Desc:  similar to cleavage stimulation factor
  misc_feature: Homolog of GI Number: 76633071 NR Desc:  similar to cleavage stimulation factor
  misc_feature: Homolog of GI Number: 73992323 NR Desc:  similar to cleavage stimulation factor
MDNSSSEQTVQDGKLYRNLNSLIVAHLRDNSLTQGLAVEKGDITRGTGFTATLPLPHTTAIDFSSVPDVKGSSKSFPKHETRHLSEHKNIARCARFSADGRFVATGSADTSIKLFEVSKIKQMLLPEAKDGPVRPVIRTYYDHIQPINDLDFHPQGTILISGAKDQTIKFFDISKTNAKRAYRVIQDTHNVRSVSFHPSGDFLLAGTDHAIPHLYDINTFQCYLSANIPETSPSGAINQIRYSCTGSMYVTASKDGAIRLWDGITANCVRSITAAHGTAEATSAIFTKDQRFVLSCGKDSTLKLWEVGSGRLVKQYLGAIHTQLRCQAIFNETEEFILSIDELSNEIVIWDAMTTEKVAKWPSNHVGAPRWLEHSPIESAFISCGTDRSVRFWKETV

SEQ ID NO: 10671 - DNA, 1569 bp, Glycine max
  misc_feature: Ceres CLONE ID no. 1656527
  misc_feature: Ceres CDNA ID no. 35383515
  CDS (425)..(1462): REFERENCED BY SEQ ID NO: 10672
aagaatctctctttatttctttcactctctcagaaccaaaattttccaaactcctcaactctcatcagatatcaaccttctctctctccaaactctcgcacctttctgctctgcccttcaatttattcacctctgacaccctcttaattctgcttccagttcctctgagtggtgaggatgatctcttctcactcccacaattcccacattatagtaatcctcatcacctgcttctttcgtcataaattctagatcaaactccacaccctgatcctcccttttacttcttatggagcatgtatcaactcaaatgaataacatgaccctttagtctaagaataagaaaaacacacacacacacacacacacacaacacacttcaaagtccaaagtccacaccaacccaccaaaaagtcttgttcccatggcgagtggcaagctttatgctggttcaaacatgtcacttctcctccaaaacgaaaggctcccttgctcctctgaagtccttgagtctctttgggctcacacctctaaccctgcttccttccaaggttcaaaatccgtggttgattttgagaatgttaatgggagcagggtgacggataggcccttttttcaagcgttggagaaagaagagaactgtgatgaggattacgaggggtgtttccatcaaccggggaagaaaaggaggctcacaagcgaacaagttcagttccttgaaaggaactttgaggtagagaacaagcttgaacccgaaaggaaggtccaacttgcaaaagagcttggcttgcagccaaggcaagttgctatatggttccaaaaccgaagagcaaggttcaagaccaagcagctagaaaaagactatggcgtgttgaaagctagttatgataggctcaaaggtgactatgaaagtcttgttcaagagaatgacaagttaaaagcagaggtgaattctctggagagcaaattgattcttagagataaagagaaggaggagaattcggatgacaagtcatctcctgatgatgctgtcaattcttcaccccacaacaacaaggagcctattatggatttattaatttcaaaaaatgcaacaacatctgaaaatggaaccgaagtgtcaacactcccactccctattatggtaacatgcaagcaagaagatgccaattcagccaaaagtgatgtgcttgattcggatagcccacattgcactgattatgggaaccacccttcctcattcgtggagcctgctgattcctctcatgcctttgaaccagaagaccactcagaagacttctcacaagatgaagaggataaccttagtgaaaactttttgaccctcccttcttcttgttgcttacctaaggttgaagaaccctgctatgatgaccctccagaaaactcttgtaattttggcttccatgttgaggatcaaaccttctgtttctggccctactgaaccaaccaaccaaccaaccgcttccaatgttataaaaacttcgcagttgtaaccatgtactagaaatcaataaaaatggtattgtacttctaaaaaaaaaaaaaaaa

SEQ ID NO: 10672 - protein, 345 aa, Glycine max
  misc_feature: Ceres CLONE ID no. 1656527
  misc_feature: Ceres CDNA ID no. 35383515
  misc_feature (141)..(185): Pfam Name: HALZ PFAM Desc: Homeobox associated leucine zipper
  misc_feature (86)..(140): Pfam Name: Homeobox PFAM Desc: Homeobox domain
  misc_feature: Homolog of GI Number: 15148918 NR Desc: homeodomain leucine zipper protein HDZ2
  misc_feature: Homolog of GI Number: 6018089 NR Desc: homeodomain
  misc_feature: Homolog of GI Number: 7488922 NR Desc: homeotic protein
  misc_feature: Homolog of GI Number: 18034445 NR Desc: homeodomain leucine zipper protein CPHB
  misc_feature: Homolog of GI Number: 1161575 NR Desc: homeobox
  misc_feature: Homolog of GI Number: 7446244 NR Desc: homeotic protein
  misc_feature: Homolog of GI Number: 76577747 NR Desc: homeobox
  misc_feature: Homolog of GI Number: 7415628 NR Desc: homeobox protein Pphb8
  misc_feature: Homolog of GI Number: 27531103 NR Desc: homeobox protein Pphb7 short form
  misc_feature: Homolog of GI Number: 27531102 NR Desc: homeobox protein Pphb7 long form
MASGKLYAGSNMSLLLQNERLPCSSEVLESLWAHTSNPASFQGSKSVVDFENVNGSRVTDRPFFQALEKEENCDEDYEGCFHQPGKKRRLTSEQVQFLERNFEVENKLEPERKVQLAKELGLQPRQVAIWFQNRRARFKTKQLEKDYGVLKASYDRLKGDYESLVQENDKLKAEVNSLESKLILRDKEKEENSDDKSSPDDAVNSSPHNNKEPIMDLLISKNATTSENGTEVSTLPLPIMVTCKQEDANSAKSDVLDSDSPHCTDYGNHPSSFVEPADSSHAFEPEDHSEDFSQDEEDNLSENFLTLPSSCCLPKVEEPCYDDPPENSCNFGFHVEDQTFCFWPY

SEQ ID NO: 10673 - DNA, 1351 bp, Glycine max
  misc_feature: Ceres CLONE ID no. 1656885
  misc_feature: Ceres CDNA ID no. 40041541
  CDS (191)..(1105): REFERENCED BY SEQ ID NO: 10674
agttacactccacctaggtttctgctgtgtgctgttactgtagctgcaaaccatatagctccgattgaatcactctgagttcaatcttcctgtttcatgtggtttagcttagcgcatgaccttaggtgggagataagtctgctagattcatctttcgtattaaggaattttctttgaaggctgtgatcttatggagcctgacaggttaaattccccaaccacatttgagatgccattggaggttatgggccatgagttacagttttctcaggatcccaattccaagcacttagggactacagtatgggatgcatcacttgtgtttgtcaagtttcttgaacggaattgcagaaagggaaagttttccccagctaaacttaaaggaaaacgtgtaattgaactaggagctggctgtggtgtttctggtattggcatggctttgttggggtgtgatgttattgtgacagaccaaaaggaggttttgccattgttacagagaaatgttgagcgtaatatttcaaggatcacgcaaaagaatcctgagtcatttggttcgatcaaggtggctgagcttcagtggggagatgagagtcacattaaggctgttggtcctccatttgactacattattggcactgatgttgtttatgtagagcatctattggagcctctattacagacaatacttgctttatctgaaccaaggactacaattatgttgggctatgagatccgctctacgagcgtccatgagaagatgcttcagaagtggaaaagaaactttgatgtcaagactgtcgcgaagtccaagatggatgaaacatttcaacatccaagtattcaactcttcattatgggattcaaacaatctgcagagtgcacagagaacccaggtcaggcaactgttgaaaaagttgatgtggaaactgttgtggaggataaaagcagggagggaaatgttgtagtagaaggatctggtctcgttgaagaaaatgttgaggatcacagtaagccaatctcacaaaatgcaaagcttagtgagtgggaagccagaaggtatggagcaatggctgcaaggattttaaaagatgtaaaaatatcctgattttgagagttgttggtctgggggatatattgtcatagcaaatacatcatgatagtcatatgcatatgcttcaagtatgttcggttcggtttaatttaccgaaactagaaattgttttttgttacattctgaaaagtaacaccccccacaaaaaatactaaacatgcactttcacctttaaaaaaaaaaaaaaaaaaaaaaaaaaaaaaaaaaaaaaaaaaaaaaaaaaaaaaaaaaaaaaaaaaa

SEQ ID NO: 10674 - protein, 304 aa, Glycine max
  misc_feature: Ceres CLONE ID no. 1656885
  misc_feature: Ceres CDNA ID no. 40041541
  misc_feature: Homolog of GI Number: 50915912 NR Desc: DNA ligase
  misc_feature: Homolog of GI Number: 8778835 NR Desc: T6D22.22
  misc_feature: Homolog of GI Number: 55296742 NR Desc: tumor
  misc_feature: Homolog of GI Number: 26452646 NR Desc: putative DNA ligase
  misc_feature: Homolog of GI Number: 76627574 NR Desc:  similar to Protein C14orf138 homolog isoform 1
  misc_feature: Homolog of GI Number: 50748926 NR Desc:  similar to chromosome 14 open reading frame 138
  misc_feature: Homolog of GI Number: 73962878 NR Desc:  similar to Protein C14orf138 homolog isoform 1
  misc_feature: Homolog of GI Number: 83028684 NR Desc:  similar to C42C1.13
  misc_feature: Homolog of GI Number: 55640685 NR Desc:  similar to chromosome 14 open reading frame 138
MEPDRLNSPTTFEMPLEVMGHELQFSQDPNSKHLGTTVWDASLVFVKFLERNCRKGKFSPAKLKGKRVIELGAGCGVSGIGMALLGCDVIVTDQKEVLPLLQRNVERNISRITQKNPESFGSIKVAELQWGDESHIKAVGPPFDYIIGTDVVYVEHLLEPLLQTILALSEPRTTIMLGYEIRSTSVHEKMLQKWKRNFDVKTVAKSKMDETFQHPSIQLFIMGFKQSAECTENPGQATVEKVDVETVVEDKSREGNVVVEGSGLVEENVEDHSKPISQNAKLSEWEARRYGAMAARILKDVKIS

SEQ ID NO: 10675 - DNA, 1852 bp, Glycine max
  misc_feature: Ceres CLONE ID no. 1656908
  misc_feature: Ceres CDNA ID no. 40041542
  CDS (198)..(1577): REFERENCED BY SEQ ID NO: 10676
tctcgcgctctcaccaactgcagcattcattcattcattcactcacagttgtcgtcacgccgtaaacggaaaaaatggcaacggcgagacgcagtttcccgccgatcaccgaatgcaacggaacgacgccgtgcgattccgtcgccgccgacctcgacggcacgctcctcatctcccgcagctcattcccgtacttcatgctcgtcgccgtcgaagccggcagcctcctccgcggcctcctcctcctcctctccgttccgttcattatcttctcctacctcttcatctccgaatccctcggcatccagatcctcatcttcatctccttctccggcctcaagatccgcgacatcgaactcgtctcacgcgccgttctccctcggttttatgctgcggacgtgaggaaggagagcttcgaggtgttcgagcggtgcaagaggaaggtcgtggtgacagcgaatccgacggtgatggtggagccgttcgtgaaggactttctcggcggagacaaggttctaggcacggagatcgaggtgaatccgaagacgaagaaggcaaccggtttcgtgaagaagcctggcgtgctcgtcggaaagtggaagcgtctcgcggttttgaaagagttcggcgatgatgaatcgccggatgttggtctcggagatcggaaaacggaccgtgacttcatgtctatttgcaaggagggttacatggtgcctccgagcaaatcagcaaaggcagtcccacaggagcgtctgaagagcagaatgatcttccacgacgggcgtttcgtgcagaggccagacccaatgaatgccctcatcaccttcacatggctccctttgggtttcgtcctctccatcataagggtctacttcaacctccctctcccagaacgcatcgtccgctacacctacgagatcctcggcatcaagctcgtaatccgcggccaccgccctcctcctccgtcccccggcacccctggcaacctctacgtctgcaaccaccgcaccgctctcgaccccatcgtcatcgccatcgccctcggccgcaaggtctcctgcgtcacctacagcgtcagcaagctctcccgcttcctttccccaatccccgccgtggccctcacccgcgaccgcgccgccgacgccgcccgaatcaaggagctcctccagaggggagacctcgtcgtctgccctgagggcaccacgtgccgtgagcccttcttgcttcgcttcagtgcactcttctctgagctcagcgataggatcgtgcccgttgctgttaactgcaagcagaacatgttcttcggaaccaccgttcgtggtgtcaagttctgggacccttacttcttcttcatgaaccctaggcctgtgtacgaggttaccttccttgaccctttgcccgaggagatgtcgtgcaaggctggtgggaagacttccattgaggtggccaaccacgtgcagaaggtggtgggggatgtgttagggtttgagtgcaccgggttgaccaggaaggataagtatatgtttctgggtgggaatgatgggaaggtggaatctctttatggggccaagaagtagtgagatatatatggttgagggggttgctactttggtttgatggttaattttgggacttgattggtttgatggtcaatatcgttttttcactattattgatcagttaagatagatacatagatcaaaaggttagctagtaagcagcaaatagcatttggtattattttttgtgcaccctttttgatatggggttttgttatggatttaagtgttttcaatatcactcaaattttctatatgtgacttgtttttttgggaaaaaaaaaaaaaaaaaa

SEQ ID NO: 10676 - protein, 500 aa, Glycine max
  misc_feature: Ceres CLONE ID no. 1656908
  misc_feature: Ceres CDNA ID no. 40041542
  misc_feature (286)..(403): Pfam Name: Acyltransferase PFAM Desc: Acyltransferase
  misc_feature: Homolog of GI Number: 53828533 NR Desc: At4g00400
  misc_feature: Homolog of GI Number: 56784423 NR Desc: phospholipid/glycerol acyltransferase
  misc_feature: Homolog of GI Number: 50904745 NR Desc: phospholipid/glycerol acyltransferase
  misc_feature: Homolog of GI Number: 6692682 NR Desc: F12K11.15
  misc_feature: Homolog of GI Number: 50940819 NR Desc: phospholipid/glycerol acyltransferase family
  misc_feature: Homolog of GI Number: 34905450 NR Desc: P0487H02.19
  misc_feature: Homolog of GI Number: 50933501 NR Desc: putative phospholipid/glycerol acyltransferase
  misc_feature: Homolog of GI Number: 77556160 NR Desc: Acyltransferase
  misc_feature: Homolog of GI Number: 72547041 NR Desc: proteophosphoglycan ppg1
MATARRSFPPITECNGTTPCDSVAADLDGTLLISRSSFPYFMLVAVEAGSLLRGLLLLLSVPFIIFSYLFISESLGIQILIFISFSGLKIRDIELVSRAVLPRFYAADVRKESFEVFERCKRKVVVTANPTVMVEPFVKDFLGGDKVLGTEIEVNPKTKKATGFVKKPGVLVGKWKRLAVLKEFGDDESPDVGLGDRKTDRDFMSICKEGYMVPPSKSAKAVPQERLKSRMIFHDGRFVQRPDPMNALITFTWLPLGFVLSIIRVYFNLPLPERIVRYTYEILGIKLVIRGHRPPPPSPGTPGNLYVCNHRTALDPIVIAIALGRKVSCVTYSVSKLSRFLSPIPAVALTRDRAADAARIKELLQRGDLVVCPEGTTCREPFLLRFSALFSELSDRIVPVAVNCKQNMFFGTTVRGVKFWDPYFFFMNPRPVYEVTFLDPLPEEMSCKAGGKTSIEVANHVQKVVGDVLGFECTGLTRKDKYMFLGGNDGKVESLYGAKK

SEQ ID NO: 10677 - DNA, 1292 bp, Glycine max
  misc_feature: Ceres CLONE ID no. 1657045
  misc_feature: Ceres CDNA ID no. 35383517
  CDS (125)..(1000): REFERENCED BY SEQ ID NO: 10678
acttgaatattcatcgtcatccgacaagaagaaagagacgccccatatccattgctgtcactctcacacaacactacactataccttccttccccttcttccatcttcatccactttctattcaatggctactctctttaacttcaattccacccttcgcccctcttgttatcttcccttatcaccctcctcgtcatatccccacttctctaatacactctccacaactttcttgggccacatcgtaaccctcaaatatgccgccacttccacaagcaaccgtggccgttctctctccactcgcatgtcatgggacggtcctctctcttccgtcaaattgatcattcagggtaaaaatctcgagctcactgatgcagtgaagcagcacgtggaagacaaagtggggaaagcggttcagaagcacagtcacctagtgagagaggttgatgtgaggctttctattcgaggaggaggtgaatttgggcgaggacccagaactcgtagatgtgaggtgactttgttcacgaaaaggcatggagtggtgcgggctgaggaggatgctgaaagcacctatggaagtatagatttggtgtcatcaatcattcagaggaagttgaggaaaataaaggaaaaggtgtcagatcatggtcgccacatgaaggggttcaataggctaaaggttagggagcccgtggagcaattacctatggaagaggatgaaatattatccccacgggaggaggaagaatcaattgatgaggttgttcgcacaaagtactttgacatgccaccattgactgtggctgaagcaattgaacagcttgaaaatgttgatcatgacttttatggttttcgaaatgaagaaactggggaaattaatattgtgtacaaacgaaaagaaggaggatatggactcattatacctaaaggtgatggtgaagcagagaaattggagtctgtagtgcttgaaccagctatagaatcctctctgaaagaatgatgggctcccacaagaaactctttttgtaagaacacaagagcttgtacatgattagcggatactaatggtggtttcttggagccagaagtgcataggcaaattcaatggaggctctgacgttttaaagtatgatgtattgtatgcttggatgacaagcgactgtagaatgaaagagatgcaccattttgattgcactgcatttgcatataatgcccagaatacgccttttctctaacaatgctacacaataattttcatcactggttttgttcaaaaaaaaaaaaaaaaaaaa

SEQ ID NO: 10678 - protein, 291 aa, Glycine max
  misc_feature: Ceres CLONE ID no. 1657045
  misc_feature: Ceres CDNA ID no. 35383517
  misc_feature (71)..(174): Pfam Name: Ribosomal_S30AE PFAM Desc: Sigma 54 modulation protein / S30EA ribosomal protein
  misc_feature: Homolog of GI Number: 51457950 NR Desc: chloroplast
  misc_feature: Homolog of GI Number: 18031 NR Desc: spinach S22 r
  misc_feature: Homolog of GI Number: 170131 NR Desc: ribosomal protein 30S subunit
  misc_feature: Homolog of GI Number: 227070 NR Desc: ribosomal protein CS
  misc_feature: Homolog of GI Number: 50920233 NR Desc: putative ribosomal protein
  misc_feature: Homolog of GI Number: 17230676 NR Desc: light
  misc_feature: Homolog of GI Number: 45508700 NR Desc: COG1544: Ribosome
  misc_feature: Homolog of GI Number: 71675565 NR Desc: Sigma 54 modulation protein/ribosomal protein S30EA
  misc_feature: Homolog of GI Number: 23125050 NR Desc: COG1544: Ribosome
  misc_feature: Homolog of GI Number: 22298376 NR Desc: light repressed protein A
MATLFNFNSTLRPSCYLPLSPSSSYPHFSNTLSTTFLGHIVTLKYAATSTSNRGRSLSTRMSWDGPLSSVKLIIQGKNLELTDAVKQHVEDKVGKAVQKHSHLVREVDVRLSIRGGGEFGRGPRTRRCEVTLFTKRHGVVRAEEDAESTYGSIDLVSSIIQRKLRKIKEKVSDHGRHMKGFNRLKVREPVEQLPMEEDEILSPREEEESIDEVVRTKYFDMPPLTVAEAIEQLENVDHDFYGFRNEETGEINIVYKRKEGGYGLIIPKGDGEAEKLESVVLEPAIESSLKE

SEQ ID NO: 10679 - DNA, 1462 bp, Glycine max
  misc_feature: Ceres CLONE ID no. 1657180
  misc_feature: Ceres CDNA ID no. 35383518
  CDS (129)..(983): REFERENCED BY SEQ ID NO: 10680
agtattcgagagctacttgcttataatttatgcaagagctctcccaagtcagctttgctttcgaagcatttattgtcattctgatcctcactgtattttgcttctaggttgtaactttttaaaagcaaatggggaatcttttttgttgtgtgcaagttgatcaatcaacagtggctataagagaaggatttggacgatttgagaaggtacttcagccaggatgccattgcatgccatggttccttggaaaacaacttgctggtcatctctctcttcggctacagcaactggatcttcgatgtgagaccaaaacaaaggataatgtctttgtcaacgttgttgcttctattcaatatcgtgccctggcagagaaggccaatgatgctttttacaaattgagcaatacaaagacccaaattcaagcctatgtttttgatgtaattagggcaagtgttccaaaactaaacttagatgatgcttttgagcagaaaaatgaaattgccaaagctgtggaagaagaacttgagaaggctatgtcagcttatgggtatgaaattgttcaaacactgattgttgatatagatccagatgagcatgtgaagcgggccatgaatgaaatcaatgctgctgcaagattgaggatggcagctaatgagaaggcagaggcagaaaagatcttgctaattaaacgagccgagggtgaggctgagtctaagtatctctctggactgggtattgctcgccaacgccaagcaattgtggatggcttgagagatagtgtgcttggattctcagttaatgtacctgggacaactgcaaaagatgtcatggacatggtccttgtcactcagtattttgacactatgaaagaaattggtgctgcctctaagtcttctgctgtgttcattccacatggacctggtgctgttcgtgatgtagctggtcaaattcgggagggacttcttcaggcttctcatcagtagcctctactccacctagatcttgtgtttggtttgaattggagtatggtgaagttatagcacctgtgtctacctgtatttctgttctgtgcagtgtgttttgtgattttgttttagaataaactgcaaaattgatcctccaaagattatggcatcatctcattaatcttcaaaagattttttctatcaaatcagtcccacaaatatctaaaatgttaccaatttttttcttagaggactaaagaagtggtaacacaagaatttagtatttgatttgtatctttgtgggattgatttgttgaccaaaatctttgaaggaccagttcaaggacttactctttcgatttatactttcaagcagtcaagtaatactgtatattctgttgtctatattgtgaatcatgcataactaaactattaagtatccctgtatatatatgttgactaaattgtgaaagttgcaaaaaaaaaaaaaaaaaaaa

SEQ ID NO: 10680 - protein, 284 aa, Glycine max
  misc_feature: Ceres CLONE ID no. 1657180
  misc_feature: Ceres CDNA ID no. 35383518
  misc_feature (7)..(193): Pfam Name: Band_7 PFAM Desc: SPFH domain / Band 7 family
  misc_feature: Homolog of GI Number: 46452120 NR Desc: hypersensitive
  misc_feature: Homolog of GI Number: 50932977 NR Desc: putative hypersensitive
  misc_feature: Homolog of GI Number: 21554781 NR Desc: hypersensitive
  misc_feature: Homolog of GI Number: 7716470 NR Desc: hypersensitive
  misc_feature: Homolog of GI Number: 23345050 NR Desc: hypersensitive
  misc_feature: Homolog of GI Number: 34484310 NR Desc: hypersensitive
  misc_feature: Homolog of GI Number: 14150732 NR Desc: hypersensitive
  misc_feature: Homolog of GI Number: 50945439 NR Desc: hypersensitive
  misc_feature: Homolog of GI Number: 7716466 NR Desc: hypersensitive
  misc_feature: Homolog of GI Number: 23345052 NR Desc: hypersensitive
MGNLFCCVQVDQSTVAIREGFGRFEKVLQPGCHCMPWFLGKQLAGHLSLRLQQLDLRCETKTKDNVFVNVVASIQYRALAEKANDAFYKLSNTKTQIQAYVFDVIRASVPKLNLDDAFEQKNEIAKAVEEELEKAMSAYGYEIVQTLIVDIDPDEHVKRAMNEINAAARLRMAANEKAEAEKILLIKRAEGEAESKYLSGLGIARQRQAIVDGLRDSVLGFSVNVPGTTAKDVMDMVLVTQYFDTMKEIGAASKSSAVFIPHGPGAVRDVAGQIREGLLQASHQ

SEQ ID NO: 10681 - DNA, 1017 bp, Glycine max
  misc_feature: Ceres CLONE ID no. 1657593
  misc_feature: Ceres CDNA ID no. 29191703
  CDS (89)..(424): REFERENCED BY SEQ ID NO: 10682
atctcacaccactttctctctcttctactctctagcaaccattccaaataaccccttctctctccttccacctctaaaaatcagcaacatggccttgtttgctcttgcagtgcttcttttagccttcactggctcttcaagtgccacttggtgtgtttgcaaggaaggaagtgatgcaatattgcagaaaaccttagattatgcttgtggagctggggctgattgtaaccctttgcatcagaatggcccttgtttccaacccaacactgtgagagctcactgtaactatgcagttaacagctatttccaaaggaagggtcaagcacaaggatcctgtgactttgcaggaaccgccactgttactgcatcagatcccagcactggaggttgttcctaccctgcaagcgccaggtatgcatcttaaacccctcttgctcttcttcttttgtttccttttttttttagcttggaatttgattcttctaacctttgaacaattttacaaatttcccctttaactacctagtttaatttttattttccttttcttaaagttgtagtatatggtagctggtattgtctatagtacacacatgtagtagaatagtggctattgactttatgtggtagcaagtgactttacttttctcataataatagagactgtgagcactgcttaaattaaaattatctatcccccacaaaaggttctcttttggggggaagtggggggagagtgtgcattattcatttgtttggcatattctcagcttgaccaacgagtaatgtagttggatttccaaaccatattcatatgaaagggttgttcctggtcttacagattttgtgagctttataaaaaaaaattcacgtgttacattttgattcagagaataatgaattatgataaaaaaaaaaaaaaaaaaaaaaaaaaaaaaaaaaaaaaaaaaaaaaaaaaaaaaaaaaaaaaaaaaaaaaaaaaaaaaaaaaaaaaaaaaaaaaaaaaaaaaaaaaaaa

SEQ ID NO: 10682 - protein, 111 aa, Glycine max
  misc_feature: Ceres CLONE ID no. 1657593
  misc_feature: Ceres CDNA ID no. 29191703
  misc_feature (20)..(103): Pfam Name: X8 PFAM Desc: X8 domain
  misc_feature: Homolog of GI Number: 50939031 NR Desc: glycosyl hydrolase family 17
  misc_feature: Homolog of GI Number: 58652092 NR Desc: At2g03505
  misc_feature: Homolog of GI Number: 34909796 NR Desc: P0403C05.4
  misc_feature: Homolog of GI Number: 57899559 NR Desc: glycosyl hydrolase family protein 17
  misc_feature: Homolog of GI Number: 22328593 NR Desc: glycosyl hydrolase family protein 17
  misc_feature: Homolog of GI Number: 51970462 NR Desc: predicted GPI
  misc_feature: Homolog of GI Number: 8778409 NR Desc: F16A14.5
  misc_feature: Homolog of GI Number: 34912962 NR Desc: beta
  misc_feature: Useful for sterility
MALFALAVLLLAFTGSSSATWCVCKEGSDAILQKTLDYACGAGADCNPLHQNGPCFQPNTVRAHCNYAVNSYFQRKGQAQGSCDFAGTATVTASDPSTGGCSYPASARYAS

SEQ ID NO: 10683 - DNA, 1318 bp, Glycine max
  misc_feature: Ceres CLONE ID no. 1657839
  misc_feature: Ceres CDNA ID no. 40041543
  CDS (134)..(949): REFERENCED BY SEQ ID NO: 10684
atatcaacagagatgacgattggagtttggtgcgaaactcgagattggtgcaattattttaaaatgctagaaatgcccaactaactcccgtacttctagctctagacccaaaattcgggaacggtaaagaacgatgcctccattgacttcgtggctggtgctgcccattctcgtgttgttggcggctccggcaacaacccctccagcacgtgcctcaccggtcgcgtcgtccttcgacggtcaacgggagtttgactatttcaagttagcgttgcaatggcccggcacttactgcaaacgcacccgcagttgctgccccaccaatggttgctgcagaggctccaattctccagcagtattcaccatacatggactctggcctgactataatgatggaagctggccgtcctgttgctctggatctagttttgatccaaaagagatatcaacattgactaatgctttagagcaatattggccatcattgagctgtagcaagccatcattatgccatggtgggaaaggaacattttgggctcatgagtgggagaaacatggcacatgctcttatcctgtgtttcgaaatgaatatgattattttctgacagttctgaatgtctatttcaaatataatattacgagcgttctaaatgatgctggatatgttccctctaatacagaaaagtatccccttggaggcatcatctctgccattgagaatgcttttcatgcatctcctcaaatagtttgctcaaaagattccattgaggaactttacctatgcttttataagaacttccagccacgagattgtgctcttggatctgacattaaaatcgacatggttacttcaaaaaaatcttgtcccaaatatgttagcttgccagaatctgtatcagtggggtacaatggacttcaaagtcgggtctctgatgatgtagctctttaaggttatggcactgtgcttctatttgtaaatatctgtaccttgcgaacgagcaaagccgcacgaataaagttattaggatgtggtaccatttatcaattagtgataaatgaatatagtgaagagctggacatttgaattgggatctagacctgctaaagtttagccagaaaaaatggttgaaagtattatttgggaattgggagctggtgccatgtatttggagtctgggttttatcattttctttattattggaagaatgtacaactgtataatggaatacgttgttgtatcacgtggaattatgaaaatatgtacctttccttaatattgtcatatatcgtttgccctaaaaaaaaaaaaaaaaaaaa

SEQ ID NO: 10684 - protein, 271 aa, Glycine max
  misc_feature: Ceres CLONE ID no. 1657839
  misc_feature: Ceres CDNA ID no. 40041543
  misc_feature (40)..(221): Pfam Name: Ribonuclease_T2 PFAM Desc: Ribonuclease T2 family
  misc_feature: Homolog of GI Number: 15149819 NR Desc: S
  misc_feature: Homolog of GI Number: 21615405 NR Desc: S
  misc_feature: Homolog of GI Number: 2642160 NR Desc: S
  misc_feature: Homolog of GI Number: 31621000 NR Desc: ribonuclease NGR2
  misc_feature: Homolog of GI Number: 56785269 NR Desc: putative S
  misc_feature: Homolog of GI Number: 56785270 NR Desc: putative ribonuclease NGR2
  misc_feature: Homolog of GI Number: 56785271 NR Desc: putative ribonuclease NGR2
  misc_feature: Homolog of GI Number: 7288208 NR Desc: RNase
  misc_feature: Homolog of GI Number: 20663976 NR Desc: Chain B
  misc_feature: Homolog of GI Number: 50513542 NR Desc: Chain A
  misc_feature: Useful for increasing chlorophyll and photosynthetic capacity
MPPLTSWLVLPILVLLAAPATTPPARASPVASSFDGQREFDYFKLALQWPGTYCKRTRSCCPTNGCCRGSNSPAVFTIHGLWPDYNDGSWPSCCSGSSFDPKEISTLTNALEQYWPSLSCSKPSLCHGGKGTFWAHEWEKHGTCSYPVFRNEYDYFLTVLNVYFKYNITSVLNDAGYVPSNTEKYPLGGIISAIENAFHASPQIVCSKDSIEELYLCFYKNFQPRDCALGSDIKIDMVTSKKSCPKYVSLPESVSVGYNGLQSRVSDDVAL

SEQ ID NO: 10685 - DNA, 902 bp, Glycine max
  misc_feature: Ceres CLONE ID no. 1657974
  misc_feature: Ceres CDNA ID no. 35383519
  CDS (224)..(706): REFERENCED BY SEQ ID NO: 10686
ggtttcagtttcttgagggtactaatatgaacagaatctcctctcaacacctttgccttgctgcagttcgcaactgcaactgcactcaaatataaatatatatacatatatatatatatatatatatatatattacttcatggtcacacatagttaagtttattaattactaggtagctggttttgaatagggtagttggtagttatagttgttgtcccagatatggaagaagcaggtttaggagattgttgttcctcgaattcgacgattacgaggaagagcgataagcgaaagcagcaacaccaacaacaagagaagccatacagaggaataaggatgaggaagtggggcaagtgggtggcggagattagagaacccaataagcgttcgaggatctggctgggttcttacgccacccccgtcgccgccgcacgcgcctatgacaccgccgtcttccacctccgaggcccttccgctcgcctcaacttccccgaattgctgtcccaggacgacgacgtttcgacccaacaacagggcaacatgtccgccgattcaattcgcaaaaaagccacccaagtcggcgccagagtcgacgcgctccaaaccgcgcttcagcaatcctcgtcctcacactccgctaattccagccacgtcagcagctctgacaaaccagacttgaacgagtatcccaaacctgaagattagtaattttcttccaccttcaagattaatattgatccaccaatcacgcgtcctgatgtgacatatatatagggcttcaacttgccctcttcacctatgctaatttgaagaagaagaaaaaaacctttttatatttgtcatatgattatatatatatcttagtagatatttttcttccaaaaaaaaaaaaaaaaaaaaa

SEQ ID NO: 10686 - protein, 160 aa, Glycine max
  misc_feature: Ceres CLONE ID no. 1657974
  misc_feature: Ceres CDNA ID no. 35383519
  misc_feature: Useful for making plants with modulated growth and phenotype characteristics
  misc_feature: The sequence is a functional homolog of  SEQ ID NO 1442 in the  10/666,642 US patent application
  misc_feature: The sequence is a functional homolog of  SEQ ID NO 16 in the  10/412,699 US patent application
  misc_feature: The sequence is a functional homolog of  SEQ ID NO 1858 in the  10/412,699 US patent application
  misc_feature: The sequence is a functional homolog of  SEQ ID NO 206 in the  11/375,241 US patent application
  misc_feature: The sequence is a functional homolog of  SEQ ID NO 2104 in the  10/374,780 US patent application
  misc_feature: The sequence is a functional homolog of  SEQ ID NO 292 in the  10/225,066 US patent application
  misc_feature: The sequence is a functional homolog of  SEQ ID NO 654 in the  11/435,388 US patent application
  misc_feature (32)..(95): Pfam Name: AP2 PFAM Desc: AP2 domain
  misc_feature: Homolog of GI Number: 78216278 NR Desc: dehydration
  misc_feature: Homolog of GI Number: 31324058 NR Desc: dehydration responsive element binding protein
  misc_feature: Homolog of GI Number: 33324520 NR Desc: dehydration responsive element binding protein
  misc_feature: Homolog of GI Number: 2281627 NR Desc: AP2 domain containing protein RAP2.1
  misc_feature: Homolog of GI Number: 21555563 NR Desc: AP2 domain containing protein RAP2.1
  misc_feature: Homolog of GI Number: 12321011 NR Desc: AP2 domain containing protein RAP2.1
  misc_feature: Homolog of GI Number: 10177606 NR Desc: TINY
  misc_feature: Homolog of GI Number: 48479312 NR Desc: putative AP2/EREBP transcription factor
  misc_feature: Homolog of GI Number: 28372974 NR Desc: At2g23340
  misc_feature: Homolog of GI Number: 50929183 NR Desc: OSJNBa0010D21.10
  misc_feature: Useful for making plants with altered leaf shape eg curled leaves
  misc_feature: Useful for making plants with altered leaf shape eg curled leaves
  misc_feature: Useful for making plants with increased biomass and foliage
MEEAGLGDCCSSNSTITRKSDKRKQQHQQQEKPYRGIRMRKWGKWVAEIREPNKRSRIWLGSYATPVAAARAYDTAVFHLRGPSARLNFPELLSQDDDVSTQQQGNMSADSIRKKATQVGARVDALQTALQQSSSSHSANSSHVSSSDKPDLNEYPKPED

SEQ ID NO: 10687 - DNA, 686 bp, Glycine max
  misc_feature: Ceres CLONE ID no. 1658100
  misc_feature: Ceres CDNA ID no. 25891820
  CDS (84)..(458): REFERENCED BY SEQ ID NO: 10688
ctaccacaccgccgctcgttattcacactgtgctgtgcttatttggcgtagcttaagagattcgcaatagaaagtgaaagaaaatgagtcgaggaagtgcaactgctgcgaagggcaagaagaagggtgcgacattcaccattgactgcgccaagccagtggaggacaagatcatggacatcgcgtctctcgagaagttccttcaagagaggattaaggttggtggcaaggccggtgctctcgccgacaccatcaccgtcacacgtgagaagaccaaaatcatagttacttcagacagcaacttctccaaacggtatctcaagtacttaactaagaagtacttgaagaagcacaatgtgcgggactggctcagagtgattgcttctaacaaagatagaagcatttatgaattgaggtacttcaacattgctgagaatgaaggagaggaagaagattaatttacccattttgagaaaccttctttacccattttcccagtgttagcttctcttttggattgagctatgttgctttgtttacattagttgcaatttaacagttttgtttatttatgagttgcagtgccatttctgttgaatttagaatagagttcacataatatattgtcagcttttgcctttgatacagtgccattgcattattaaacaaaaaaaaaaaaaaaaaaa

SEQ ID NO: 10688 - protein, 124 aa, Glycine max
  misc_feature: Ceres CLONE ID no. 1658100
  misc_feature: Ceres CDNA ID no. 25891820
  misc_feature (9)..(124): Pfam Name: Ribosomal_L22e PFAM Desc: Ribosomal L22e protein family
  misc_feature: Homolog of GI Number: 6714454 NR Desc: putative 60S ribosomal protein  L22
  misc_feature: Homolog of GI Number: 12642842 NR Desc: putative 60S ribosomal protein L22
  misc_feature: Homolog of GI Number: 50939919 NR Desc: putative 60S ribosomal protein L22
  misc_feature: Homolog of GI Number: 42733478 NR Desc: BRI1
  misc_feature: Homolog of GI Number: 6056419 NR Desc: 60S ribosomal protein  L22
  misc_feature: Homolog of GI Number: 72012073 NR Desc:  similar to 60S ribosomal protein L22
  misc_feature: Homolog of GI Number: 85392 NR Desc: development
  misc_feature: Homolog of GI Number: 73956651 NR Desc:  similar to 60S ribosomal protein L22
  misc_feature: Homolog of GI Number: 33150766 NR Desc: heparin
  misc_feature: Homolog of GI Number: 13592059 NR Desc: ribosomal protein L22
MSRGSATAAKGKKKGATFTIDCAKPVEDKIMDIASLEKFLQERIKVGGKAGALADTITVTREKTKIIVTSDSNFSKRYLKYLTKKYLKKHNVRDWLRVIASNKDRSIYELRYFNIAENEGEEED

SEQ ID NO: 10689 - DNA, 922 bp, Glycine max
  misc_feature: Ceres CLONE ID no. 1658119
  misc_feature: Ceres CDNA ID no. 40041544
  CDS (20)..(703): REFERENCED BY SEQ ID NO: 10690
attgtggaagaacaaagcaatggcttcagctaaaaggtggcttccgctcgaagctaatcctgacgtcatgaatcagttcctttgggggcttggacttcgagaggatgaggcagaatgctgtgacgtttatggcttagatgaagagcttctggaaatggttccaaagcccgttcttgccgtgctttttctttatcccataaccacccagagtgaagaagagaggttgcagcaggaaaatgaaaaaaaggaatataacagtagagtctattttatgaagcaaactgtgggtaatgcttgtgggacaattgggctgcttcatgctcttggtaacttgacttctgaagtcaagctcgttgaggggtcgttctttgataacttttttaaatctactgcaagcttggatccattgcagcgtgcaacatttcttgagaatgacaaagaaatggaagtggctcatttggtggcagcaactgctggtgatacagaggcatcagacaatgcaactgcacatttcatatgctttgcttgtgtggatgatgaactttatgagcttgatggaagaaagtcagtgccaatatctcacggtccatcatcaccaagtactttgttaagggatgcagctaaagcaatacagagcatgatccagaaaaatccagactccttcaacttcaatgtcattgccttgtgtaagaaatccgggtagatattgatttaggcttgttggggtcagtgagtatgcttagattttactttcgtaagtcatctaggaagcagagcattttccactccagattaatgctaagcgagttatttccatgatgaacaatgtgaatccatcgtgtgaagcgatatagaatattttttttgcctatacttaaaaaaaaaaaaaaaaaaaaaaaaaaaaaaaaaaaaaaaaaaaaaa

SEQ ID NO: 10690 - protein, 227 aa, Glycine max
  misc_feature: Ceres CLONE ID no. 1658119
  misc_feature: Ceres CDNA ID no. 40041544
  misc_feature (6)..(211): Pfam Name: Peptidase_C12 PFAM Desc: Ubiquitin carboxyl
  misc_feature: Homolog of GI Number: 28973167 NR Desc: putative carboxyl
  misc_feature: Homolog of GI Number: 50911393 NR Desc: carboxyl
  misc_feature: Homolog of GI Number: 50927490 NR Desc: OSJNBa0079A21.11
  misc_feature: Homolog of GI Number: 7268503 NR Desc: carboxyl
  misc_feature: Homolog of GI Number: 50929477 NR Desc: OSJNBa0043A12.3
  misc_feature: Homolog of GI Number: 54695588 NR Desc: ubiquitin carboxyl
  misc_feature: Homolog of GI Number: 28913414 NR Desc: Ubiquitin carboxyl
  misc_feature: Homolog of GI Number: 7710106 NR Desc: ubiquitin carboxyl
  misc_feature: Homolog of GI Number: 73989372 NR Desc:  similar to Ubiquitin carboxyl
MASAKRWLPLEANPDVMNQFLWGLGLREDEAECCDVYGLDEELLEMVPKPVLAVLFLYPITTQSEEERLQQENEKKEYNSRVYFMKQTVGNACGTIGLLHALGNLTSEVKLVEGSFFDNFFKSTASLDPLQRATFLENDKEMEVAHLVAATAGDTEASDNATAHFICFACVDDELYELDGRKSVPISHGPSSPSTLLRDAAKAIQSMIQKNPDSFNFNVIALCKKSG

SEQ ID NO: 10691 - DNA, 1999 bp, Glycine max
  misc_feature: Ceres CLONE ID no. 1658730
  misc_feature: Ceres CDNA ID no. 35383520
  CDS (45)..(1643): REFERENCED BY SEQ ID NO: 10692
aacgtttctcttcttttctcactcagtgtcacttcttcaccgccatgaatgctatagccactgcttctgctctctctcttccgatttttcttagagctgggaagcttgacaccaaaagggatttgaaaggtagatttagagtgtttgctgtatttggagaagaagagaagaaaaatgcatggggtgcgctttttgatgttgaggatccgagatctaagtttccacagaataaagggaaggttttggatatatctcaagcactagaagtggcaagacatgatattcagtacttagattggcgagctcggcaagatgtgctaacaatcatgcacctccatgaaaaggtggtcgaagttcttaatcctctagctcgcgaatataaatcaattggcaccctgaaaaaggagctagccgagttgcaggatgaattagcacaagcacacacacaggttcatatatctgaagcaagggttaccactgctttagataaacttgcttacatggaagaattggtaaatgataggctgttgcaagatcgaagcacgactgatgttgcccaaacatcctcttctcccagtacttctgcaaattctttagttacagaaaagagaaggcagccacggaaaagcttgaatgtatcgggtccagttcagtcataccatccccatttgaagaatttctggtatcctgttgctttttctaatgacctaaaggatgataccatgatcccaatagaatgttttgaggaaccatgggttatctttcgagggaaagatgggaagcctggatgtgtgcagaacacctgtgcacatagagcctgccctctgcaccttggttcagtaaatgagggtcgtatccaatgtccctaccatggctgggaatatactactgatggaaaatgtgagaaaatgccatctactcgacagctaaatgtgaaaataaagtcagttccatgctttgaaaaggagggaatgatctggatttggcctggcaatgaccccccagcagccacacttccatctatactacctccttctggatttgaaatccatgctgagattgtgatggaacttccaattgaacacggtttacttttggacaatcttttggatcttgcacatgccccttttactcacacctcaacatttgctaagggatggagtgttcccagcttggtgaattttttgacacctgcatctggcctgcaaggatactgggatccctatcctattgatatggagtttcgaccaccttgcatggtactatcaaccattggaatttcaaagcctgggaaactggagggacaaagtaccagggaatgttcaacgcacctgcaccaacttcatgtctgcttaccatcttcaaaacaaaagacaagattgctatacagaatgtcactggattttgctcctctgcttaagcatatacctttaatgaaatatctatggaggcattttgcagaacaggttttaaatgaggatctacggctagtggtggggcagcaagagagaatgaacaatggtgcaaacgtatggaatttcccagtagcctacgacaagcttggggtgagatacagaatgtggagagatgcattggagagaggagccaaacaactaccattctcaccacaacacatagattaagtacagagtgaacaatttttattttctttttctctcactcagtgatgcttcttaaatccttcgataaggaatttttcttttttcaactcaaggcttcatcatctctacaagagcttccggaaactgttgtattcatcagaggctgttcctttccctataatagtcgagtcttgacaccttttcacccttttttcattttttttaaatgtgtacagtttcaaaccatttttttccccttgtgatatctgcaccatctctcatctggtgccttaaccttacccttattcaaaggggaatgttgtctgacacaatattcagggcaaatgtaatttaattcaaaaaaaaaaaaaaaaaaa

SEQ ID NO: 10692 - protein, 532 aa, Glycine max
  misc_feature: Ceres CLONE ID no. 1658730
  misc_feature: Ceres CDNA ID no. 35383520
  misc_feature (212)..(309): Pfam Name: Rieske PFAM Desc: Rieske [2Fe
  misc_feature: Homolog of GI Number: 9944967 NR Desc: LLS1 protein
  misc_feature: Homolog of GI Number: 42571757 NR Desc: chlorophyll a oxygenase
  misc_feature: Homolog of GI Number: 42571759 NR Desc: chlorophyll a oxygenase
  misc_feature: Homolog of GI Number: 5853117 NR Desc: chlorophyll a oxygenase
  misc_feature: Homolog of GI Number: 22135956 NR Desc: chlorophyll a oxygenase
  misc_feature: Homolog of GI Number: 5478797 NR Desc: chlorophyll b synthase
  misc_feature: Homolog of GI Number: 25453530 NR Desc: chlorophyll b synthase
  misc_feature: Homolog of GI Number: 78709027 NR Desc: chlorophyll synthase
  misc_feature: Homolog of GI Number: 37536964 NR Desc: putative chlorophyll synthase
  misc_feature: Homolog of GI Number: 37536968 NR Desc: putative chlorophyll synthase
MNAIATASALSLPIFLRAGKLDTKRDLKGRFRVFAVFGEEEKKNAWGALFDVEDPRSKFPQNKGKVLDISQALEVARHDIQYLDWRARQDVLTIMHLHEKVVEVLNPLAREYKSIGTLKKELAELQDELAQAHTQVHISEARVTTALDKLAYMEELVNDRLLQDRSTTDVAQTSSSPSTSANSLVTEKRRQPRKSLNVSGPVQSYHPHLKNFWYPVAFSNDLKDDTMIPIECFEEPWVIFRGKDGKPGCVQNTCAHRACPLHLGSVNEGRIQCPYHGWEYTTDGKCEKMPSTRQLNVKIKSVPCFEKEGMIWIWPGNDPPAATLPSILPPSGFEIHAEIVMELPIEHGLLLDNLLDLAHAPFTHTSTFAKGWSVPSLVNFLTPASGLQGYWDPYPIDMEFRPPCMVLSTIGISKPGKLEGQSTRECSTHLHQLHVCLPSSKQKTRLLYRMSLDFAPLLKHIPLMKYLWRHFAEQVLNEDLRLVVGQQERMNNGANVWNFPVAYDKLGVRYRMWRDALERGAKQLPFSPQHID

SEQ ID NO: 10693 - DNA, 569 bp, Zea mays
  misc_feature: Ceres CLONE ID no. 1659391
  misc_feature: Ceres CDNA ID no. 35383521
  CDS (83)..(364): REFERENCED BY SEQ ID NO: 10694
aatccaccatcacacagcaatccacacaagcacttcgacgtcacacgggcgctgcgcacagacacaccaagcgtcggcaccaatggcttactaccaggaggtggactactgctcggaggaggtgaggtcggtggccccggccggcttcggccgccacggcggcggcgtccagcagcacgtcgtcaaggagaagttcgaggaggtcgacacggtctcacgcgccggcgccaaccaccaccaccaccatggtcaccacggcggcgacggcttcgtggtgcgcgagaccagggtcgaagaggacatcaacacctgcaccggcgagttccacgagcgcagggagagcttcctcgccagggctaactgagccgcccggcggccggcatccacgcccgttcgtgcttgcctgcgtgccttatgtatgtctgtggttgactggttgtgcagggtcatcgtacttggctatcgtacgtgcacgcactcagctcctgtacgaattacgacaataagctcgtgacctgaataaaacttcttcgtaatactaatacctacaccaaaaaaaaaaaaaaaaa

SEQ ID NO: 10694 - protein, 93 aa, Zea mays
  misc_feature: Ceres CLONE ID no. 1659391
  misc_feature: Ceres CDNA ID no. 35383521
  misc_feature: Homolog of GI Number: 50902350 NR Desc: P0456E05.27
  misc_feature: Homolog of GI Number: 6478144 NR Desc: putative glycine
  misc_feature: Homolog of GI Number: 50902348 NR Desc: P0456E05.26
MAYYQEVDYCSEEVRSVAPAGFGRHGGGVQQHVVKEKFEEVDTVSRAGANHHHHHGHHGGDGFVVRETRVEEDINTCTGEFHERRESFLARAN

SEQ ID NO: 10695 - DNA, 853 bp, Glycine max
  misc_feature: Ceres CLONE ID no. 1660427
  misc_feature: Ceres CDNA ID no. 35383522
  CDS (34)..(465): REFERENCED BY SEQ ID NO: 10696
aaattctcgtcaaccttctctgctgagacaacaatggcgatggctttcaaaatggccactactgggatgtgggtgacggatgagtgcaagaactctttcatggaaatgaagtggaagaaggttcatagatacatagtcttcaagatcgatgagaagtcaaggcttgtcaccgttgataaggtgggtggtcccggcgagagctatggtgatctcgccgcctccttgcccgacgatgattgtagatatgccgtattcgactttgatttcgtcaccgtcgataactgccgcaagagcaagatcttcttcattgcatggtctccaacagcatcaaggataagagcaaagatgctctacgcaacatccaaggatggtctgagaagagctctggatggaatcagctatgaagttcaagccaccgatccagccgagatgggattcgatgtaattcaagacagagccaaatagatgcccccttttttaaagtgggaatccaactccttatttatgtgcctgagctaatcaattaatccatcaatcttactctcttttatttgctataattaagtaactatatatagtccaatgactgtatgacatgtgctcttctcttctttcttgtttttatgctagtttaattgtgttcgatgtaagtggggcatctaatcttcaatccttaagtcataatattaagttatgtgtaatatatgactgtcgggtgtatgataagttaagggcaacaaactttggttgcaatctctttaatgatgaaaatttgtggaaaagaatggattagctcaacttttcccacggaaagttgatgcgttaccatattgaaaaaaaaaaaaaaaaaaaa

SEQ ID NO: 10696 - protein, 143 aa, Glycine max
  misc_feature: Ceres CLONE ID no. 1660427
  misc_feature: Ceres CDNA ID no. 35383522
  misc_feature (16)..(143): Pfam Name: Cofilin_ADF PFAM Desc: Cofilin/tropomyosin
  misc_feature: Homolog of GI Number: 15293263 NR Desc: putative actin depolymerizing factor 5
  misc_feature: Homolog of GI Number: 25295742 NR Desc: actin depolymerizing factor 5
  misc_feature: Homolog of GI Number: 7270448 NR Desc: actin depolymerizing factor
  misc_feature: Homolog of GI Number: 18874466 NR Desc: actin depolymerizing factor
  misc_feature: Homolog of GI Number: 7330254 NR Desc: actin depolymerizing factor
  misc_feature: Homolog of GI Number: 4566614 NR Desc: actin depolymerizing factor
  misc_feature: Homolog of GI Number: 24745620 NR Desc: actin depolymerizing factor 6
  misc_feature: Homolog of GI Number: 20197894 NR Desc: actin depolymerizing factor 6
  misc_feature: Homolog of GI Number: 14906219 NR Desc: actin
  misc_feature: Homolog of GI Number: 21554684 NR Desc: putative actin
MAMAFKMATTGMWVTDECKNSFMEMKWKKVHRYIVFKIDEKSRLVTVDKVGGPGESYGDLAASLPDDDCRYAVFDFDFVTVDNCRKSKIFFIAWSPTASRIRAKMLYATSKDGLRRALDGISYEVQATDPAEMGFDVIQDRAK

SEQ ID NO: 10697 - DNA, 674 bp, Glycine max
  misc_feature: Ceres CLONE ID no. 1660459
  misc_feature: Ceres CDNA ID no. 36707581
  CDS (68)..(496): REFERENCED BY SEQ ID NO: 10698
agggttttgcgctgttgttgctgctcatcctccgtaacctccgagctctgcaccgaagaacgaagccatggggaagacacatggaatgggatctgctcgcaagctcaagtcccaccgcaggaggcaaaggtgggctgacaagtcatacaagaaatcacatcttggaaatgaatggaagaaaccttttgctggttcatcccatgccaagggaattgtccttgaaaagataggtattgaggctaagcagcccaactctgccattcgtaagtgtgccagggttcaacttatcaagaatgggaagaagattgccgcttttgtccctaatgacggttgcttgaactacattgaagagaatgacgaagtcttgattgctggatttggacgaaaaggtcatgctgtgggagatattcctggtgtcaggtttaaggtcgtgaaggtctctggtgtctctcttttggctctcttcaaggagaagaaggagaagccaaggtcttaaatttgtggagtacttgtgtttgttttcaatagtttctctcaagtattatgaattttgtttttaggtgaacgggttttatgaacaattttctatcttttctagttattttactgaacttcatttaacatttcaagtaacatatctcggcttgcctcgccaaaaaaaaaaaaaaaaaaaa

SEQ ID NO: 10698 - protein, 142 aa, Glycine max; identical to SEQ ID NO: 3466
  misc_feature: Ceres CLONE ID no. 1660459
  misc_feature: Ceres CDNA ID no. 36707581
  misc_feature (9)..(141): Pfam Name: Ribosomal_S12 PFAM Desc: Ribosomal protein S12
  misc_feature: Homolog of GI Number: 62287478 NR Desc: 40S ribosomal protein S23
  misc_feature: Homolog of GI Number: 1362041 NR Desc: ribosomal protein S23.e
  misc_feature: Homolog of GI Number: 50919443 NR Desc: 40S ribosomal protein S23
  misc_feature: Homolog of GI Number: 21536723 NR Desc: putative 40S ribosomal protein S23
  misc_feature: Homolog of GI Number: 6682246 NR Desc: putative 40S ribosomal protein S23
  misc_feature: Homolog of GI Number: 11121260 NR Desc: 40S ribosomal protein S23
  misc_feature: Homolog of GI Number: 30025641 NR Desc: 40S ribosomal protein S23
  misc_feature: Homolog of GI Number: 58395907 NR Desc: ENSANGP00000012229
  misc_feature: Homolog of GI Number: 69608480 NR Desc: ribosomal protein S23e

SEQ ID NO: 10699 - DNA, 950 bp, Glycine max
  misc_feature: Ceres CLONE ID no. 1660521
  misc_feature: Ceres CDNA ID no. 29191624
  CDS (151)..(696): REFERENCED BY SEQ ID NO: 10700
atggtttcgggggagtttcttcttggatcttaccctcttgtttgctaatattctcattcttctgtctctgcttcttctccttgtaagttctctcgctcgctctctccgcctgtttcttctccttgtggactgtaagagctgaactaagagatggggttgtctttcaccaagctttttagccggctctttgctaagaaagagatgcgtattctcatggtaggtcttgatgctgctggtaagactaccatcttgtacaagctcaagctgggagaaattgtcacaaccattcccacaattggattcaatgtggagactgtggaatataagaatattagctttactgtatgggatgtgggtggccaagataagatccgtcctttatggagacactacttccaaaacactcaggggcttatctttgttgtggatagcaatgatcgtgaccgtgtagttgaggctagagatgagctccaccggatgttgaatgaggatgagttgagagatgctgttctcctggtatttgccaacaaacaagatcttccaaatgctatgaatgctgcagaaatcacagacaagcttggtcttcattctctacgccaacgccactggtatatccagagcacatgtgccacctctggggaaggactatatgaagggctggactggctctccaacaatatagctaacaaggcttaagggacattttgtggaatgccgctatcttcttgcttggctttacgattatattatgaggttgatgggttgttgcatctcttatatagcattataatattttcttttttactcttttaagtcttttctttttctttatttaggtgtttgatactatatcatagcaatcgtattggatcctgtagaatttttaaataattaatgaattacaaactatacatgacccgatcatgtttttcaaaaaaaaaaaaaaaaaa

SEQ ID NO: 10700 - protein, 181 aa, Glycine max
  misc_feature: Ceres CLONE ID no. 1660521
  misc_feature: Ceres CDNA ID no. 29191624
  misc_feature: null
  misc_feature: Useful for making plants with altered Lignin content
  misc_feature: Useful for making plants with altered alkaloid content
  misc_feature (4)..(177): Pfam Name: Arf PFAM Desc: ADP
  misc_feature: Homolog of GI Number: 77812440 NR Desc: ADP ribosylation factor 002
  misc_feature: Homolog of GI Number: 47026845 NR Desc: ADP
  misc_feature: Homolog of GI Number: 50511366 NR Desc: ADP
  misc_feature: Homolog of GI Number: 37791223 NR Desc: ARF
  misc_feature: Homolog of GI Number: 34909214 NR Desc: putative ADP
  misc_feature: Homolog of GI Number: 39653273 NR Desc: ADP
  misc_feature: Homolog of GI Number: 29028258 NR Desc: ADP
  misc_feature: Homolog of GI Number: 11131026 NR Desc: ADP
  misc_feature: Homolog of GI Number: 77999271 NR Desc: ADP
  misc_feature: Useful for increasing seed/fruit yield or modifying fruit content
  misc_feature: Useful for making ornamental plants with modified leaves
  misc_feature: Useful for sterility
MGLSFTKLFSRLFAKKEMRILMVGLDAAGKTTILYKLKLGEIVTTIPTIGFNVETVEYKNISFTVWDVGGQDKIRPLWRHYFQNTQGLIFVVDSNDRDRVVEARDELHRMLNEDELRDAVLLVFANKQDLPNAMNAAEITDKLGLHSLRQRHWYIQSTCATSGEGLYEGLDWLSNNIANKA

SEQ ID NO: 10701 - DNA, 1050 bp, Glycine max
  misc_feature: Ceres CLONE ID no. 1660694
  misc_feature: Ceres CDNA ID no. 35383523
  CDS (303)..(767): REFERENCED BY SEQ ID NO: 10702
gtgcatgccagccacacttttcaatccctctcaatatcacttgaatttttattttttttaatctttctctctgtttgcgtgtgtttattggtttgggagtctcaataattttccttcccctggttcttttgttttagccatatgatagctagatgtatattttatttcgttactagctaatgttcatttttgttgtttgtaagaaagaccacttttttccagttattttacaactaacacttgttttattttggttataattttaataggaattcagatcttataatcctcagtttggtcctatgaaggacagacacatgaagaaaaaagtcaaaaggttgaaagacatggttgagccagataaaaattgcgagactagggttgaagatgttgcttggctttgctccctttcagagtctgagatcgacatgctgattagcttgaaattgttgatcattcagcgtgcaaaaatgatgggttgtaaagagctggctagtaaattcaaccttaaaatgattcgagccattgcacttgttttgatggaacatctcaaggctgagataaaaggttcatcacttatccccaacacggttgaatctacttcttttttagatgcttgcaacctattgaaatgtagcaatgaggttgatgcaaatattgatgacctaagtgcaagtcttggtgctgatattagtgatatgcaaacttttcttagaagtcctccaacatccaaacaaaagaagcagaaagttggaagcagagaatgaaacgcttgcagttattggaggacctaaaacatctagcttatccttgtgacaacacctttacttaggctgtggaagctctcatttatagtttctttctcattgctgaatttgcatacaagtgtatctaatattattaggttgcttatagttttttattgacatttttctatttgcgtagctaagaaattagttggagcaaatacctcggttatatttagaaaattgtcgcaagaatgtgtagcaagcaaatccccattttgtctaaaaaaaaaaaaaaaaaaaa

SEQ ID NO: 10702 - protein, 154 aa, Glycine max
  misc_feature: Ceres CLONE ID no. 1660694
  misc_feature: Ceres CDNA ID no. 35383523
MKDRHMKKKVKRLKDMVEPDKNCETRVEDVAWLCSLSESEIDMLISLKLLIIQRAKMMGCKELASKFNLKMIRAIALVLMEHLKAEIKGSSLIPNTVESTSFLDACNLLKCSNEVDANIDDLSASLGADISDMQTFLRSPPTSKQKKQKVGSRE

SEQ ID NO: 10703 - DNA, 798 bp, Glycine max
  misc_feature: Ceres CLONE ID no. 1660739
  misc_feature: Ceres CDNA ID no. 35383524
  CDS (140)..(526): REFERENCED BY SEQ ID NO: 10704
gaatgctaagcgagctagggttcatccggtgttgcagagagacatctattgacactgtgaattattcaagaggacccgacaatcccacaaagcgtaagtctcactttattattactcgagaaagagaggttgttatgttatggcgggcaaaggtgttggttcagtggctaaggcagtagcagaatatcagtatccttggcgtgagaagttggcgaaatataaggatgagtttgctaagggtgtgtggggatactgggagctgggggcatggaagccgctgagcatcggtgctcggcatcgcgctagaattcgcaaggaagtcctccttgctggggaagattggccgtatgatcctgaaaggaaggagatgaagaccaggaggaaaggacacaaatgtgataggatatccgctgagaagcgcgcaaacactgccaagttgatggagaagatgccccagatgttgctggattacaagaagagaaggtggcagaagaagatgaaggaggaagacaagggaaaactttgattttgctcctcctctagttttggccaggtttagcattaaactgtgcctttgagaaatgtagtatttaatcatgacatgttacacctgttttgggggcctaatggattattaactttggttacgtttttcaatccctaataacccctttcaagagtatggccttgtgagtatcggggaaaagggctttactacaatggaaatgatatgtactttttgtttatgtatatgcttggttgagtgcatattggtactaaaaaaaaaaaaaaaaaaaa

SEQ ID NO: 10704 - protein, 128 aa, Glycine max
  misc_feature: Ceres CLONE ID no. 1660739
  misc_feature: Ceres CDNA ID no. 35383524
MAGKGVGSVAKAVAEYQYPWREKLAKYKDEFAKGVWGYWELGAWKPLSIGARHRARIRKEVLLAGEDWPYDPERKEMKTRRKGHKCDRISAEKRANTAKLMEKMPQMLLDYKKRRWQKKMKEEDKGKL

SEQ ID NO: 10705 - DNA, 746 bp, Glycine max
  misc_feature: Ceres CLONE ID no. 1660927
  misc_feature: Ceres CDNA ID no. 29191625
  CDS (32)..(568): REFERENCED BY SEQ ID NO: 10706
acagttgcggagtcaatcgaaatcggcggagatggttgccatgaggtttcaccagtaccaggtggtgggaagggctcttcctaccgaatccgatgagcatcctaagatctaccgcatgaaactctgggccaccaacgaggtccgtgccaaatccaagttctggtattttttgagaaaattgaagaaggttaagaaaagcaatggacaagtgctagccatcaatgagatttttgagaagaatcctaccaagattaagaattatggaatttggctgcgttatcagagccgcactggttatcacaatatgtacaaggaataccgagatacaactctgaatggtgcagttgagcatatgtacactgaaatggcatctcgtcatagggtgaggcatccatgcatccagataattaagactgccaccatcccagctaagctgtgcaaaagggagagcaccaagcagttccacaattctaaaatcaagttcccattggtgttcaagaagattaggcctccaactaggaagctgaagacaacatacaaggcatccaggccaaacctatttatgtgattcagttaatggaatttccctgcttgttgattcattaagtataaaaaggaagagcttagaggtgatccatgtagtgacaaacttcgttgcctgcaaccatagtttgcattcttttaagctctgaagattttgtttttgaaagatggtgttttatttaatctaaaaaaaaaaaaaaaaa

SEQ ID NO: 10706 - protein, 178 aa, Glycine max
  misc_feature: Ceres CLONE ID no. 1660927
  misc_feature: Ceres CDNA ID no. 29191625
  misc_feature (5)..(178): Pfam Name: Ribosomal_L18ae PFAM Desc: Ribosomal L18ae protein family
  misc_feature: Homolog of GI Number: 13430184 NR Desc: ribosomal protein L18a
  misc_feature: Homolog of GI Number: 30102898 NR Desc: At2g34480
  misc_feature: Homolog of GI Number: 50511482 NR Desc: putative 60S ribosomal protein L18a
  misc_feature: Homolog of GI Number: 20453309 NR Desc: AT3g14600/MIE1_10
  misc_feature: Homolog of GI Number: 21593925 NR Desc: putative 60S ribosomal protein L18A
  misc_feature: Homolog of GI Number: 34909590 NR Desc: putative ribosomal protein L18a
  misc_feature: Homolog of GI Number: 23197702 NR Desc: 60S ribosomal protein L18A
  misc_feature: Useful for making ornamental plants with modified flowers
  misc_feature: Useful for making ornamental plants with modified leaves
  misc_feature: Useful for making plants with altered leaf shape eg curled leaves
  misc_feature: Useful for making shorter plants
MVAMRFHQYQVVGRALPTESDEHPKIYRMKLWATNEVRAKSKFWYFLRKLKKVKKSNGQVLAINEIFEKNPTKIKNYGIWLRYQSRTGYHNMYKEYRDTTLNGAVEHMYTEMASRHRVRHPCIQIIKTATIPAKLCKRESTKQFHNSKIKFPLVFKKIRPPTRKLKTTYKASRPNLFM

SEQ ID NO: 10707 - DNA, 957 bp, Glycine max
  misc_feature: Ceres CLONE ID no. 1660995
  misc_feature: Ceres CDNA ID no. 35383525
  CDS (105)..(698): REFERENCED BY SEQ ID NO: 10708
agttaccctttagttttggttccaaattttcaagtaaaaaaaatataggataggagcttgcagtgatggaaggaagaaagtggtagatgcagcattagtgaaagatgagcacaacacggtttattaagtgtgtcacagttggtgatggggctgtgggaaagacttgcatgcttatctcttacactagcaacactttccccacggattatgttcctacagttttcgacaatttcagtgcaaatgttgtggttgatggcagcacagttaacctgggattgtgggacactgctggacaggaagattacaacaggcttaggccattgagttacagaggagcagatgtgttcttgctggccttttccctcatcagcaaagccagctatgaaaatatatctaaaaagtggattcctgaattgagacattatgccccaactgtgcctattgtactggttggaactaaacttgatttgagggaagacaggcaatatttgattgatcatcctggaaccacagctatagctactgcccagggagaagaactgaagaaggcaattggtgctgctgtgtacatagagtgcagctcaaagactcagcagaatgtgaaggccgtgtttgatgctgcaatcaaggttgttttgcaaccacctaagtccaagaaaaaaggaaagaagaagaacacgccttgtgttttcctctgattcaagttgttgaattgcaattgcagttgcagtggtattgttcaagttaaattcccatcctgtaacattcagatccttcttcccgggattctctttttcttttcattttgattcatgaatccattagaacatataagtactgtaaactatactatattgttctctaatatgtctatttgatgaaagtagactcaactcaagattatatgatatacatcacataacatgcttcaaatctgaaaaaaaaaaaaaaaaaaaa

SEQ ID NO: 10708 - protein, 197 aa, Glycine max
  misc_feature: Ceres CLONE ID no. 1660995
  misc_feature: Ceres CDNA ID no. 35383525
  misc_feature: null
  misc_feature: Useful for making plants with modulated nitrogen use efficiency
  misc_feature (8)..(179): Pfam Name: Ras PFAM Desc: Ras family
  misc_feature: Homolog of GI Number: 1370201 NR Desc: RAC2
  misc_feature: Homolog of GI Number: 5532524 NR Desc: Rac
  misc_feature: Homolog of GI Number: 4588758 NR Desc: rac
  misc_feature: Homolog of GI Number: 6822324 NR Desc: small GTP binding protein RACDP
  misc_feature: Homolog of GI Number: 58531944 NR Desc: small GTP
  misc_feature: Homolog of GI Number: 20148543 NR Desc: similar to ATGP3
  misc_feature: Homolog of GI Number: 4959465 NR Desc: Rop4 small GTP binding protein
  misc_feature: Homolog of GI Number: 12083284 NR Desc: putative RAC GTP
  misc_feature: Homolog of GI Number: 1087111 NR Desc: pea Rho1 protein homolog/mammalian rac protein homolog
  misc_feature: Homolog of GI Number: 38524283 NR Desc: putative RACD protein
MSTTRFIKCVTVGDGAVGKTCMLISYTSNTFPTDYVPTVFDNFSANVVVDGSTVNLGLWDTAGQEDYNRLRPLSYRGADVFLLAFSLISKASYENISKKWIPELRHYAPTVPIVLVGTKLDLREDRQYLIDHPGTTAIATAQGEELKKAIGAAVYIECSSKTQQNVKAVFDAAIKVVLQPPKSKKKGKKKNTPCVFL

SEQ ID NO: 10709 - DNA, 1110 bp, Glycine max
  misc_feature: Ceres CLONE ID no. 1660998
  misc_feature: Ceres CDNA ID no. 35383526
  CDS (46)..(894): REFERENCED BY SEQ ID NO: 10710
agaagagaaccctagctagggaggacaggtagttggtgtgaggcaatgacgcggcctttcggtgtgaagggggggaggaagcgaaagcacgcggaacccaaatacgacgcccatgacgaagaagaagaagaagaaacgcaaccaaagaaaactgtggtggaggtggagcacaaccaagaagaagaagaagaaactccagcaccagcaccagaggatgatggattgagcggtatcccaattgcgcccagtgcgaacaacactaacaaacccaacgtcatcttcattcttgaaaaagcttctttggaagtcgccaaagtcggcaagacatatcagctcttaaactccgacgaccatgccaatttcctccgcaaaaataacaagaatcccggagattacaggcctgacattactcatcagtcccttctatcaattttggatagcccactaaataaagctgggagattgcgatcagtatacataaggactgaaaaaggtgttcttatagaggttaagccctttgttcgtattccaagaacattcaaacgctttgctggtgtcatgttggaactgcttcaaaaattgagcatatctgctgttggcaagcgcgagaaacttctccgaaccatcaaaaaccctgtcacacagtatttgcctatcaactcacgaaaaataggtctatcatatagttcagaaaagcttgtagatatggatgactacgtatcaactgttaccagcaatatggaccttgtctttgtggttggagcaatggcccatgggaagattgagacagattatacagaagattatgtagcaatttcggggtaccctctaagtgctgcttattgtattacaaggattactggcgcccttgagagaaagtggaagattttgtgatttaacaccaccttcagttcatgcctgagacgatttagtaattcgagttccatagtcaatttatgtaatatcagggataggggcctagcagtgatttagaaaatacaatatatgttgatttttttgaggcattgatgtcctggaccagagtgatgtttcaatgtagtacttgaattaaatatgcttaatatattattttgttgaaaaaaaaaaaaa

SEQ ID NO: 10710 - protein, 282 aa, Glycine max
  misc_feature: Ceres CLONE ID no. 1660998
  misc_feature: Ceres CDNA ID no. 35383526
  misc_feature (111)..(277): Pfam Name: Mra1 PFAM Desc: Suppressor Mra1
  misc_feature: Homolog of GI Number: 50907071 NR Desc: putative nucleolar essential protein
  misc_feature: Homolog of GI Number: 27713326 NR Desc: similar to C2F
  misc_feature: Homolog of GI Number: 7305109 NR Desc: gene rich cluster
  misc_feature: Homolog of GI Number: 55241966 NR Desc: ENSANGP00000016225
  misc_feature: Homolog of GI Number: 66505576 NR Desc:  similar to ENSANGP00000016225
  misc_feature: Homolog of GI Number: 61840141 NR Desc:  similar to Probable ribosome biogenesis protein NEP1
  misc_feature: Homolog of GI Number: 2276396 NR Desc: C2f
  misc_feature: Homolog of GI Number: 31652262 NR Desc: C2f protein
  misc_feature: Homolog of GI Number: 19114583 NR Desc: downstream factor of ras
  misc_feature: Useful for decreasing plant size
  misc_feature: Useful for making ornamental plants with modified flowers
  misc_feature: Useful for making shorter plants
  misc_feature: Useful for sterility
MTRPFGVKGGRKRKHAEPKYDAHDEEEEEETQPKKTVVEVEHNQEEEEETPAPAPEDDGLSGIPIAPSANNTNKPNVIFILEKASLEVAKVGKTYQLLNSDDHANFLRKNNKNPGDYRPDITHQSLLSILDSPLNKAGRLRSVYIRTEKGVLIEVKPFVRIPRTFKRFAGVMLELLQKLSISAVGKREKLLRTIKNPVTQYLPINSRKIGLSYSSEKLVDMDDYVSTVTSNMDLVFVVGAMAHGKIETDYTEDYVAISGYPLSAAYCITRITGALERKWKIL

SEQ ID NO: 10711 - DNA, 909 bp, Glycine max
  misc_feature: Ceres CLONE ID no. 1662991
  misc_feature: Ceres CDNA ID no. 40041546
  CDS (28)..(729): REFERENCED BY SEQ ID NO: 10712
ggttcttccgcaactaagtgagtgagaatgaaaatgttgcaggtggcaatagtgcaattggctgcgttgcaggtttttgttatttttttgagtggtggtgctgattacataccgccttcaaggttggatgggttcgtctaccaaaatgggtacttagatttggatactgttttgatagaagcgttttatgatccggtgtgcccatacagcagggattcatggcctccactcaaacaagctcttcatcactattcttctcgggtttcgttcctccttcatctcctccctttaccttaccatgacaatgctttcgtcgcgacccgtgctttgcacattgtgaacacattgaacgcatctgcaacgttccccttgctggaatggttcttcaagcatcaggagaaattttacggggcccaaacacggaacttatctagggcttctattgtagatgagatagtgaagtctgcaacagaagcagctgggagctcttattataacgccataaagcatggcttcaatgacacaaaaactgattatcagaccagagtttctttcaagtacgctgcttcgagaggggtgtatggaacgccttctttctatgtcaatggattcttgttgcctgatactggagctaccgctgactacaagacttggaggaaggtcattgatccattggttggtgtgaagaagagtatccagaatgaagagtcccttcgtttcttcttgtaaaaattgtgggaatgtaaagcccagttgcattagcactttatcattgaaggaatccaaataaagagtgtctcgtagctgctagtgtcgagaatgcaataatggaatcaactgttataaaacattccttagtccttgcatatacatatgtggcatgggttggaaaaaaaaaaaaaaaaaaaa

SEQ ID NO: 10712 - protein, 231 aa, Glycine max
  misc_feature: Ceres CLONE ID no. 1662991
  misc_feature: Ceres CDNA ID no. 40041546
  misc_feature (47)..(222): Pfam Name: DSBA PFAM Desc: DSBA
  misc_feature: Homolog of GI Number: 8778978 NR Desc: Contains similarity to pigpen protein from Mus musculus gbAF224264
  misc_feature: Homolog of GI Number: 8778813 NR Desc: T4O12.23
  misc_feature: Homolog of GI Number: 50930901 NR Desc: OSJNBb0015G09.12
MLQVAIVQLAALQVFVIFLSGGADYIPPSRLDGFVYQNGYLDLDTVLIEAFYDPVCPYSRDSWPPLKQALHHYSSRVSFLLHLLPLPYHDNAFVATRALHIVNTLNASATFPLLEWFFKHQEKFYGAQTRNLSRASIVDEIVKSATEAAGSSYYNAIKHGFNDTKTDYQTRVSFKYAASRGVYGTPSFYVNGFLLPDTGATADYKTWRKVIDPLVGVKKSIQNEESLRFFL

SEQ ID NO: 10713 - DNA, 900 bp, Glycine max
  misc_feature: Ceres CLONE ID no. 1663125
  misc_feature: Ceres CDNA ID no. 40041547
  CDS (387)..(806): REFERENCED BY SEQ ID NO: 10714
aagggataaaccctaacgccgcgaggccaaggcaacattcatccgaagttctgcatcaaacactgcttgaactttgaatttctattgcagaaggacgtgtcaacgtaagcgtgtacgaattgcaatgttgagctcttttgtcacttttgtgacttgaacagctacgcaatatttcattcgtagtctgttccatggtctcgttgtgccattcctttttgttcatttttttttattaacgttgcttcttttggtgaactctcccttattattccatggtggttgttctagtttccgaagcatatataaattaattcgtctcgaataaccggttttaaacagcgtggtgtaatcttctctaagctaccctatgctacctgtcttctgaaatggaaacgccaaatgtaacgatacctaaagttggacctaaaccgtcgaggaaagtgaagcttccgacgccgaaggagctgatatcacactatgaatctaagggtatggactcgcaagatgcgtcgttgaaggtcattgaggatcttcagaaggctctgtttagagtcatatcctctggcaaaggtaaacacgacaagctattgactgaatcttctaggaggattgatgcaattaacaatagactcactgttcttgacatgaagcttgattccaagcctgcttatgttgaaacttttgcaattgggcttgcctctggagctgccctcaaaggtattggtgcagttgtgcctcatattattgcccctcttactcagatatggaactctgtttcctctgccattaaatcttccccccaatgatattagtatgtaattattagtttgtagaaatattttttaatgaaatgactatgctaccattttttatgtcattacaaaaaaaaaaaaaaaaaaa

SEQ ID NO: 10714 - protein, 139 aa, Glycine max
  misc_feature: Ceres CLONE ID no. 1663125
  misc_feature: Ceres CDNA ID no. 40041547
METPNVTIPKVGPKPSRKVKLPTPKELISHYESKGMDSQDASLKVIEDLQKALFRVISSGKGKHDKLLTESSRRIDAINNRLTVLDMKLDSKPAYVETFAIGLASGAALKGIGAVVPHIIAPLTQIWNSVSSAIKSSPQ

SEQ ID NO: 10715 - DNA, 1036 bp, Glycine max
  misc_feature: Ceres CLONE ID no. 1663149
  misc_feature: Ceres CDNA ID no. 40352070
  CDS (75)..(698): REFERENCED BY SEQ ID NO: 10716
ctctcgcccagaatccgagatcaaccctgacccctaaggccaggggtttttctcggcttcttcagattcctgaaatggcgtctgtttcagctttagccaagtacaagctcgtcttcttgggtgaccaatccgtgggcaaaaccagcatcatcactcgcttcatgtacgataaattcgataacacctatcaggctacaattggtattgattttctatcaaaaactatgtatctcgaagatcgaactgttcgactgcagttgtgggatacagctggccaggaaagatttagaagtcttattccaagctacattagggactcatctgtagctgttattgtatatgatgttgcaagccggcagactttcctaaatactgcaaagtggattgaagaggtgcgaacagagagaggcagtgatgtcattattgttcttgttgggaacaaaactgatcttgtcgagaaaagacaagtctctatagaggaaggggaagcaaaagcacgtgagctcaatgtcatgttcattgaaactagtgctaaggctgggtttaatataaaggccctatttcgaaaaattgctgcagcactacctggaatggaaacactatcttctgcaaaacaagaagacatggttgatgtaaacttaaagtctacaaatggcagtgctcagtctcaacctcagtcaagtggatgtgcttgttaagtatactttatcatgtgcggtccacctttttgtgtcatgctttttgttttatgcgggtttttctatagtcttctacagcattatatgaaaagatgaaagaatatataagcggatcagggtaggggttgataaaagttctgtctagacaatttctgttgttagttggttttttgcctataatgtgtactaatgaattttttttttttgaacggcataatgtagtaaaggtacccaacccaaaattgaattgtgttcattgtaccctgtaaaacgtgtgatatgtttaaaatttaacttgttcatctggattgacgtaagaaaaaaaaaaaaaaaaaaaa

SEQ ID NO: 10716 - protein, 207 aa, Glycine max
  misc_feature: Ceres CLONE ID no. 1663149
  misc_feature: Ceres CDNA ID no. 40352070
MASVSALAKYKLVFLGDQSVGKTSIITRFMYDKFDNTYQATIGIDFLSKTMYLEDRTVRLQLWDTAGQERFRSLIPSYIRDSSVAVIVYDVASRQTFLNTAKWIEEVRTERGSDVIIVLVGNKTDLVEKRQVSIEEGEAKARELNVMFIETSAKAGFNIKALFRKIAAALPGMETLSSAKQEDMVDVNLKSTNGSAQSQPQSSGCAC

SEQ ID NO: 10717 - DNA, 755 bp, Glycine max
  misc_feature: Ceres CLONE ID no. 1663407
  misc_feature: Ceres CDNA ID no. 40041548
  CDS (40)..(459): REFERENCED BY SEQ ID NO: 10718
gctggtttttattagtatctccgtccctttcattacacaatgagcagaaacagcgatgaacctgcgatgactgaagaagcaccaaccaaacagtccctagcgaacatcttctctttgttccgcaaaatcaattttcaactccctttcctcccacccaaacctgaagaaccgaagcttgaggctcaggctcagcaggagggtccgaagcctggccgtgtacagtttccgaaaagccaagtggcgctgattgcttcttcgcctctgcaagctgaacctgatgctgaccactctcccgctgccaagacaaccaatcctcttattctctggcagatttatgcaataggagcgattgcgatttcatcatgggtttgggcaaggtggaatgagaggaagggccgaggggggtctcccagtgatgagaggggtgaaggaagacattctgatgatggaaatcagtgatcttatggcgatgaagagaaattttcattagctgtatacagctatgaagcacggacactccagtcccttgtcgtgtctggtgtccgacacgcgtccgtgtcagtgtccgacaccgacacgacacccgtattacgttctatattttggacattacaggtatccacgtgtccgtatctgtgtcgtgtccggtgtccgtgtcggtgttggtgcttcataggtatacagtgctatgtcaatactctcacattctcaggatgaatgaaaatttgtttcatcaaaaaaaaaaaaaaaaaaaa

SEQ ID NO: 10718 - protein, 139 aa, Glycine max
  misc_feature: Ceres CLONE ID no. 1663407
  misc_feature: Ceres CDNA ID no. 40041548
  misc_feature: Homolog of GI Number: 515932 NR Desc: E24 ASN
  misc_feature: Homolog of GI Number: 414200 NR Desc: chloroplast outer envelope 24 kD protein
MSRNSDEPAMTEEAPTKQSLANIFSLFRKINFQLPFLPPKPEEPKLEAQAQQEGPKPGRVQFPKSQVALIASSPLQAEPDADHSPAAKTTNPLILWQIYAIGAIAISSWVWARWNERKGRGGSPSDERGEGRHSDDGNQ

SEQ ID NO: 10719 - DNA, 832 bp, Glycine max
  misc_feature: Ceres CLONE ID no. 1663445
  misc_feature: Ceres CDNA ID no. 40041549
  CDS (38)..(697): REFERENCED BY SEQ ID NO: 10720
aacccccactctcctcttctcttcttttccaaaaacaatgaagctcattagcaccatcaaccccaaaaacctcaaactaagccccaaacgcttctttcgtaaaaaggaaccatctttagtctcacgctccgacccgccttctttcggatccggatcctcctccgttgactcttccaccgcaaatcacaaaccttcccccggtaaccaaactccgaccagcgttctcccggacgtctccggcgagtggtccgaggtcgccgccgccgccgttgacgtgcggtgggacctcgcgcaggccttgcgcctcatcgaccgcgacaacgacggcgtcgtcacgcgccaggacctcgagtcgcttctcacgcgccttggcgcgtcgccgagccccggcgacgtggcgctcatgctcggcgaggtcgacggcgacggcatcacggttgagtctctcatgagctacgtcgggtcgggtctcgaaactgggtcggatcccgacgagctcaaagaagccttcgaggtgttcgacacggatcgagacgggaggatctcggcggaggagctgcttagggttttcaaagccatcggcgacgaacggtgcacgttagaggagtgccggcgcatgatagagggagtggacagaaacggggacgggttcgtctgcttcgaggacttttctcgtatgatggacctgcagcggtgatgatgacgtggttgtgattgtgatgatgtcagatgatgatcatgatcatgttatgatgagacgatgtgaaaaaatatatataagaaggaaggcaacttctccaattttttttttcaaaaaaaaaaaaaaaaaaaa

SEQ ID NO: 10720 - protein, 219 aa, Glycine max
  misc_feature: Ceres CLONE ID no. 1663445
  misc_feature: Ceres CDNA ID no. 40041549
  misc_feature (83)..(111): Pfam Name: efhand PFAM Desc: EF hand
  misc_feature: Homolog of GI Number: 6056210 NR Desc: calmodulin
  misc_feature: Homolog of GI Number: 21536925 NR Desc: calmodulin
  misc_feature: Homolog of GI Number: 15810637 NR Desc: putative calmodulin protein
  misc_feature: Homolog of GI Number: 16213 NR Desc: calmodulin like protein
  misc_feature: Homolog of GI Number: 77552977 NR Desc: EF hand
  misc_feature: Homolog of GI Number: 77548632 NR Desc: EF hand
  misc_feature: Homolog of GI Number: 71040671 NR Desc: calcium
  misc_feature: Homolog of GI Number: 50904487 NR Desc: B1147A04.10
  misc_feature: Homolog of GI Number: 15221781 NR Desc: polcalcin
  misc_feature: Homolog of GI Number: 21554396 NR Desc: touch
MKLISTINPKNLKLSPKRFFRKKEPSLVSRSDPPSFGSGSSSVDSSTANHKPSPGNQTPTSVLPDVSGEWSEVAAAAVDVRWDLAQALRLIDRDNDGVVTRQDLESLLTRLGASPSPGDVALMLGEVDGDGITVESLMSYVGSGLETGSDPDELKEAFEVFDTDRDGRISAEELLRVFKAIGDERCTLEECRRMIEGVDRNGDGFVCFEDFSRMMDLQR

SEQ ID NO: 10721 - DNA, 665 bp, Glycine max
  misc_feature: Ceres CLONE ID no. 1663507
  misc_feature: Ceres CDNA ID no. 29191626
  CDS (87)..(398): REFERENCED BY SEQ ID NO: 10722
attggtaccgcgaaacgcacatttcactattcattctcgtttccctttcgactgtgattgtttgttaactgaacttttcgagcaaaatgtctggacgtggaaaggggggcaagggtttgggaaagggaggagcgaaacgacaccgtaaggtgttgcgcgataacattcagggaatcaccaagcctgcgattcggcgtttggctcgcaggggtggtgtgaagcgtatcagtggtctcatctacgaggagacacgtggcgtgctcaagatctttctggagaacgtgattcgtgacgccgttacctacactgagcacgctaggagaaagaccgttacggcaatggatgtggtttatgctctcaagagacaaggaagaaccctctacggatttggaggctagtttgtttttttttttttttttttaatttttattgttaggtttcgtttgttttggaggtttatgtgggatgtaagagacccttgctattagggagatagggaaaaaaattgcaaggatttggtgtagtaagttgctggtggtgttttaggtataagggtttctataacatgtaatgtattgagctatattgctgccaagcttgtaattgtatcacaatatgttgctaatgtcagattcttgtttttctgtcaaaaaaaaaaaaaaaaa

SEQ ID NO: 10722 - protein, 103 aa, Glycine max; identical to SEQ ID NO: 8
  misc_feature: Ceres CLONE ID no. 1663507
  misc_feature: Ceres CDNA ID no. 29191626
  misc_feature (66)..(92): Pfam Name: TAF PFAM Desc: TATA box binding protein associated factor
  misc_feature: Homolog of GI Number: 61820747 NR Desc:  similar to germinal histone H4 gene
  misc_feature: Homolog of GI Number: 62648434 NR Desc:  similar to germinal histone H4 gene
  misc_feature: Homolog of GI Number: 74004228 NR Desc:  similar to germinal histone H4 gene
  misc_feature: Homolog of GI Number: 57106967 NR Desc:  similar to germinal histone H4 gene
  misc_feature: Homolog of GI Number: 57110415 NR Desc:  similar to germinal histone H4 gene
  misc_feature: Homolog of GI Number: 56798269 NR Desc: histone H4
  misc_feature: Homolog of GI Number: 62663604 NR Desc:  similar to Histone H2B 291B
  misc_feature: Homolog of GI Number: 57098917 NR Desc:  similar to germinal histone H4 gene
  misc_feature: Homolog of GI Number: 50728590 NR Desc:  similar to germinal histone H4 gene
  misc_feature: Homolog of GI Number: 55667113 NR Desc:  similar to germinal histone H4 gene

SEQ ID NO: 10723 - DNA, 851 bp, Glycine max
  misc_feature: Ceres CLONE ID no. 1663537
  misc_feature: Ceres CDNA ID no. 40352071
  CDS (73)..(714): REFERENCED BY SEQ ID NO: 10724
ataccccatcactctctctctctctctctcatccacacgaatcacactctccacagtgcgattcattcaccaatggatcgcaacggcgttctctctctcgcattcatctgcattgtagtcgccggcgtcggaggacagtctcccgccgcagcgccgtcaaacactccggcaactcccgccgccgccactcccgcccaagcaccttccacagtaccgaaatcaccagctcccgttgcttctcccaaatcatctccaccagctgcaacccctgcatctactccggcggcatctcccaccaccacccccgccgcgcctgctccggtgaccaagccacctgcagcctctcctcctccggcgactcctccaccggcaactcctcctccggcgccggttcccgtgagctctccccccgctcccgtgccggtgagttctccacccgctcctgttccggtggcggcgccaaccacccctgtggctccctctccggctccgaagcataagaagaagggcaagaagcacggtgctccggctccttcaccgttgttaggacctcctgcgccacccaccggagctcctggacccagcgaggatgcttcttcccctggacctggcactgctgccaacgatgagagtggagcagagaccaccatgtgcttggagaaggttctaggaggcctagctttgggttgggctacccttgttttggtcttctagacaggctttgttgctgttattaaattcttgtatttgtatcatttatttcctttttttttcttttatcttttgagcctgtattgggtacacattacatttatttacattgttaccttcaaaaaaaaaaaaaaaaaaaa

SEQ ID NO: 10724 - protein, 213 aa, Glycine max
  misc_feature: Ceres CLONE ID no. 1663537
  misc_feature: Ceres CDNA ID no. 40352071
MDRNGVLSLAFICIVVAGVGGQSPAAAPSNTPATPAAATPAQAPSTVPKSPAPVASPKSSPPAATPASTPAASPTTTPAAPAPVTKPPAASPPPATPPPATPPPAPVPVSSPPAPVPVSSPPAPVPVAAPTTPVAPSPAPKHKKKGKKHGAPAPSPLLGPPAPPTGAPGPSEDASSPGPGTAANDESGAETTMCLEKVLGGLALGWATLVLVF

SEQ ID NO: 10725 - DNA, 648 bp, Zea mays
  misc_feature: Ceres CLONE ID no. 1664319
  misc_feature: Ceres CDNA ID no. 36707276
  CDS (70)..(441): REFERENCED BY SEQ ID NO: 10726
agctctctgcttccctctccattttttcatctcattcggcgccgcggcaccccctgctcgtcactcgcgatggcccggatcaaggtgcacgagctgcgcggaaagagcaagacggatctgcaagcgcagctcaaggagcttaaatcggagctctccctcctacgcgtcgccaaggtcaccggcggggctcccaacaagctctccaaaatcaagattgtgcgcacctccatcgctcgcgtgctcaccgttatctcgcagaagcagaagtcggcgctgcgtgaggcgtacaagaagaagaagcttctcccgctcgatctccgccccaagaagacccgcgccattcgcaggcgcctcaccaagcaccagctctccttgaagaccgagagggaaaagaagcgtgagaagtattttcccatgcggaagtacgctatcaaggcctagattagtgaaagaacagcttttatcccatcaagttttgcccagaagttttttgagtttgatgtaccccacatctttcgtcattacaatgttgagttgtatgatgaaaaaatgttttgcccagaagttccttgagtttgatcaactgcatgatgaaaaaatgtgtactttttgtttgttgaaaaaaaaaaaaaaaaaaaaaaaaaaaaa

SEQ ID NO: 10726 - protein, 123 aa, Zea mays
  misc_feature: Ceres CLONE ID no. 1664319
  misc_feature: Ceres CDNA ID no. 36707276
  misc_feature (6)..(64): Pfam Name: Ribosomal_L29 PFAM Desc: Ribosomal L29 protein
  misc_feature: Homolog of GI Number: 50923665 NR Desc: OSJNBb0006N15.8
  misc_feature: Homolog of GI Number: 51979244 NR Desc: PREDICTED OJ1126_B06.24 gene product
  misc_feature: Homolog of GI Number: 33589770 NR Desc: At5g02610
  misc_feature: Homolog of GI Number: 21592412 NR Desc: putative 60S ribosomal protein L35
  misc_feature: Homolog of GI Number: 17104643 NR Desc: putative 60S ribosomal protein L35
  misc_feature: Homolog of GI Number: 62751093 NR Desc: similar to 60S ribosomal protein L35
  misc_feature: Homolog of GI Number: 30102548 NR Desc: At3g55170
  misc_feature: Homolog of GI Number: 71535092 NR Desc: putative 60S ribosomal protein L35
  misc_feature: Homolog of GI Number: 6984224 NR Desc: 60S ribosomal protein L35
MARIKVHELRGKSKTDLQAQLKELKSELSLLRVAKVTGGAPNKLSKIKIVRTSIARVLTVISQKQKSALREAYKKKKLLPLDLRPKKTRAIRRRLTKHQLSLKTEREKKREKYFPMRKYAIKA

SEQ ID NO: 10727 - DNA, 1834 bp, Zea mays
  misc_feature: Ceres CLONE ID no. 1670489
  misc_feature: Ceres CDNA ID no. 40352072
  CDS (137)..(1267): REFERENCED BY SEQ ID NO: 10728
aaaaaaatttttgtctcgcgcttcgctctcacgctcgcgtcaccggagctctccagaaccgaaccccaactgcccaagggcgagcgatccgaacccctcggcggcttcgtcaacgacgccgagaacactttgaggaatggctgaagaggatgtccagccccttgtgtgtgacaatggcactggaatggtcaaggcgggtttcgctggtgacgacgcaccgagagctgtctttcctagcattgtaggcaggccacgccacactggtgtgatggtgggcatgggccaaaaggatgcatatgtgggcgatgaagctcagtccaaaagaggtattctgacactgaagtacccaattgagcacggcattgtcggcaactgggatgacatggagaagatctggcaccacaccttctacaatgagcttcgtgtggcacctgaggagcaccctatactgctgaccgaggctcctctgaaccccaaggcaaacagggagaagatgacccagattatgttcgagacattcaactgcccagcaatgtatgtggccatccaggccgttctttccctgtacgccagtggtcgaacaacgggtattgtgctcgactctggtgatggtgtgagccacaccgtccctatctacgaagggtacacgcttcctcatgctattcttcgattggaccttgctggtcgtgaccttaccgacaacctgatgaagatccttactgagaggggttactccttcactacgactgccgagcgagaaattgtcagggacatcaaggaaaaacttgcctacgttgcccttgattatgaacaggagctggagactgccaggaccagctctagtgttgagaagagctacgagctgcccgatggccaggttatcacaatcggtgcagaaaggtttaggtgccctgaggttctattccagccatccttcattggcatggaatctgctggcatccatgaagccacgtacaactccatcatgaagtgcgacgtcgatatcagaaaggatctgtacggtaatgttgtcctcagtggtggctccactatgttccctggtattggtgaccgcatgagcaaggagattactgcacttgcccccagcagcatgaaggtgaaggtggttgctccgccggagaggaagtacagtgtttggattggtggttccattctggcctccctcagtacctttcagcagatgtggatctccaaggaagagtatgacgaatctggtccgggcatagtccacatgaaatgcttctgaatttctggagcagtatatctgttgcttgcattttcagttagttgggatgcaagtttgtcccgtggtctcgctagcattcttcgttctttctggatattgaagagctgttggccatggagcattgtgcaaggtggtaaagtcgattgatggtactacatgaagaaacatgtgcagtacttcagcagtatagatcgtcaggtcagtttagtttttttttcaacaacagtgccatattaggatgttcctgatgtgcgcagttggtctgggtttttacacaacgcaagggtgtcggctgtcgcccgtgcagtttgcgtctttgtgagatctgggtccgtttctgcactccagtacgtggaacaggtttcgcatttggtggccagtgccccagcgtggcgtgagtgttgatgatttgaacttggagctgtttgttctattcctttcatgaaacagatattatcgtttgtacagggataaataataaattgtttatccttcaaatgttttagatactgttggaacaaacttcgtttaattataatctcttggatttaaaaaaaaaaaaaaaaa

SEQ ID NO: 10728 - protein, 376 aa, Zea mays
  misc_feature: Ceres CLONE ID no. 1670489
  misc_feature: Ceres CDNA ID no. 40352072
  misc_feature: The plant flowers significantly late compared to wild-type.
  misc_feature: The plant is abnormally small.
  misc_feature: Useful for making plants with modulated biomass
  misc_feature: Useful for making plants with modulated flowering time
  misc_feature (7)..(376): Pfam Name: Actin PFAM Desc: Actin
MAEEDVQPLVCDNGTGMVKAGFAGDDAPRAVFPSIVGRPRHTGVMVGMGQKDAYVGDEAQSKRGILTLKYPIEHGIVGNWDDMEKIWHHTFYNELRVAPEEHPILLTEAPLNPKANREKMTQIMFETFNCPAMYVAIQAVLSLYASGRTTGIVLDSGDGVSHTVPIYEGYTLPHAILRLDLAGRDLTDNLMKILTERGYSFTTTAEREIVRDIKEKLAYVALDYEQELETARTSSSVEKSYELPDGQVITIGAERFRCPEVLFQPSFIGMESAGIHEATYNSIMKCDVDIRKDLYGNVVLSGGSTMFPGIGDRMSKEITALAPSSMKVKVVAPPERKYSVWIGGSILASLSTFQQMWISKEEYDESGPGIVHMKCF

SEQ ID NO: 10729 - DNA, 1512 bp, Zea mays
  misc_feature: Ceres CLONE ID no. 1670693
  misc_feature: Ceres CDNA ID no. 40352073
  CDS (54)..(1211): REFERENCED BY SEQ ID NO: 10730
aagctgcagctccgaccaagcctgcttgctgccttcgtccatctcaagtatccatggcgcggctcctcctcctcctcggggcctccgtgctgctgctcgcgtccgccgtcacggcgcaggactgcctgtccgcgacgttcagcggcgggcggaccttcgggaagtgcaacagcctgccgtcgctcagcgccagcctgcactggacgtaccacccggagaacggcacggccgacgtggcgttccgcgcgccgtcggaccccagcggctgggtcgcctggggcatcaaccccgacagcggcggcagcatggccgggagcagcgtcttcgtcgcctcgcaggacggcagcggcgccgtgtccatcctcatgaccaacctggagagcaccagccccagcctcactaacaccaccgccctcaagttcaaggtgcccgccggccccgccgccgagtactccgaccgcgcgtacaccatctacgccacggtggagcttccccggaactccacgcagcagttcacggtgtggcaggccggcccggcgaccagcaacggtggcatctcccctcacccgacggcgccggccaacttggccagcacccagcggctggacttcctctccggctccagcaccgccgcgtcaaactccaagcttcaccgccgtaacatccacgggatgctgaacgcgattgcgtggggcgtcctgatccccaccggcgccatcatcgcgcgctacctgcgcgtgttcgagtccgcggacccagcatggttctacctccacatcgcctgccagtgctccggctacgtcctcggcgtggccggctggggcctggggctgaagctgggcagcgagtccgccggcgtcacctaccagccccaccgcagcatcggcatcgccatcttctgcctggccaccctccaggtgctggcgctgctgctcaggcccgacaagaagaacaaatacaggctctactggaacatctaccatcactccgtcggctacgccgtcatcgtcctcagcgccgtcaacatcttcaaggggctccacatcctcgagccggccagcggctacaagaccgcctacattgtcatcctggccacgctcgccggcatcgcgctctgcctcgaggccatcacgtggcccatcgccatccggaagcgcaggcgcaacgccgacaaggcgtccggcggcaacggctggcagcagggtgcgtagtagggaccagatcgcccggcttgtgcttagttttgaatgcgagagagggatgtgatatcgatgtgctcatttcgttgttcagacttcagagggatcgttgctgcctgtgctttctttctcttcctgttattactacctctctagtctgtacttgtacgtagaagagtagctccttattttttttaattattagggttctataatggcatttgtacacatttaaaaaaaaaaaaaaaaaaaaaaaaaaaaaaaaaaaaaaaaaaaaaaaaaaaaaaaaaaaaaaaaaaaaaaaaaaaaaaaa

SEQ ID NO: 10730 - protein, 385 aa, Zea mays
  misc_feature: Ceres CLONE ID no. 1670693
  misc_feature: Ceres CDNA ID no. 40352073
MARLLLLLGASVLLLASAVTAQDCLSATFSGGRTFGKCNSLPSLSASLHWTYHPENGTADVAFRAPSDPSGWVAWGINPDSGGSMAGSSVFVASQDGSGAVSILMTNLESTSPSLTNTTALKFKVPAGPAAEYSDRAYTIYATVELPRNSTQQFTVWQAGPATSNGGISPHPTAPANLASTQRLDFLSGSSTAASNSKLHRRNIHGMLNAIAWGVLIPTGAIIARYLRVFESADPAWFYLHIACQCSGYVLGVAGWGLGLKLGSESAGVTYQPHRSIGIAIFCLATLQVLALLLRPDKKNKYRLYWNIYHHSVGYAVIVLSAVNIFKGLHILEPASGYKTAYIVILATLAGIALCLEAITWPIAIRKRRRNADKASGGNGWQQGA

SEQ ID NO: 10731 - DNA, 955 bp, Zea mays
  misc_feature: Ceres CLONE ID no. 1670877
  misc_feature: Ceres CDNA ID no. 40041550
  CDS (98)..(322): REFERENCED BY SEQ ID NO: 10732
aactacccttttatctagtcgctgcagggttagggcagtgaagtctcttcccgttcttgagttctagccaggctgcaatgtgtgagtgttgtggttcatgttcacgtcagtgtttactctccccagccatcaggtcgtctcgaggagttgctcgcccgtgtcactcgtgttcggtaatctccttaagccagttaagctcatgaagctgcccttttcatctctactgcagtgtctcattgggaacgccgcggtgccgccggtgaacgccgctgggaatgatctcgccgtggcagaccttgtctggggcctgttgcgtgcgtgatctagggttggtctgctctgtggtgagtcgctagtgcctgctccaccgtggttgggaactctactgcgtcatcgttccggcttaacaccgtcagagttcggcgccgccggcacgcgtagaggaagcgcgggcgcgcgtggtgctggagcctagggctgtaagcgctatctgagtgggccagttttgcctggagttgggctagctggagctcccaaaataaagagtgaagatttaagatgaagtggttgctgaagaggagtctactccagtgcctgttcatcaagtggatggagccatctaactgatcatcgtgttagaagtatctagaacctcttctctgcaacaaaggagaagttttattcccttatcttttggttagttacttcatgtggaggccttgaagcttagaatgtttatgtgtatctcttaaacggcttcacccttccaattattgtaataagttatgcactttgggtactatcaggacttgtaataaatacatctctttctaccttgtaaaacttgagttctggaatgtaaagtgtactttgtaaaagtcttccgctctatctccaaaaaaaaaaaaaaaaaaaaaaaaaaaaaaaaaaaaaaaaaaaaaaaaaaaaaaaaaaa

SEQ ID NO: 10732 - protein, 74 aa, Zea mays
  misc_feature: Ceres CLONE ID no. 1670877
  misc_feature: Ceres CDNA ID no. 40041550
MFTSVFTLPSHQVVSRSCSPVSLVFGNLLKPVKLMKLPFSSLLQCLIGNAAVPPVNAAGNDLAVADLVWGLLRA

SEQ ID NO: 10733 - DNA, 995 bp, Zea mays
  misc_feature: Ceres CLONE ID no. 1671064
  misc_feature: Ceres CDNA ID no. 36707584
  CDS (271)..(711): REFERENCED BY SEQ ID NO: 10734
agtactgatggacttactatagccacttgtaatgtctttgtcatcatagtaatttagttacattttatttggttgacattgacgatggtacagtaaattgtctaaaaataatttggatagactatcctgtttgagtgttcgacatgccttttaatcacatcataactatagtatttttttgtgatttgatacttctttggtctaaaatttagttttatgtacccttagatcaatagtcttattggaactaaggtggagtgggtttatcatatgttacaagcattcaacagcggcaaccttgccctctaccaagaactttgcagggttcacaatgctgctcttactgcacaaccagctttggtgcagaatgagcggaagctgcttgagaaaatcaatattctttgtctgatggagataatctttagtcggccatctgaagatagaactattccattaagtgttattgctgagcggactaagctttcaatcagtgacgtggaatgtcttcttatgaagagcctctcggttcatcttattgagggaataattgatgaagtggacagtacagttcacgtatcatgggtccagcctagagtgcttggaattccacaggttaaggctttgcgcgaccgcctggatgcctgggttggaaaggtgcataccacattgctttcagttgaggcggaaacacctgatcttgttgctgtgtaatttcacagctgttacacttccgcgagaggcttggtcagcaaggtcccatttgcaaaatgtgagatgctttgtgtgacacgtagtcattttctggataatgagatctgctgctgccctgagcgtttgtcttcctgcgcctactgatcaggacatgtaatttcttttttggtgccctcaggacatggatggttagaactgcacgcagtgtcacggagacgggaccaatggattgaaaatttcatactagtagggtgttactagtagaacaaaaaaaaaaaaaaaaa

SEQ ID NO: 10734 - protein, 146 aa, Zea mays
  misc_feature: Ceres CLONE ID no. 1671064
  misc_feature: Ceres CDNA ID no. 36707584
  misc_feature (1)..(104): Pfam Name: PCI PFAM Desc: PCI domain
  misc_feature: Homolog of GI Number: 34914614 NR Desc: putative 26S proteasome subunit
  misc_feature: Homolog of GI Number: 17298163 NR Desc: 26S proteasome regulatory particle non
  misc_feature: Homolog of GI Number: 20260474 NR Desc: 26S proteasome subunit
  misc_feature: Homolog of GI Number: 17298161 NR Desc: 26S proteasome regulatory particle non
  misc_feature: Homolog of GI Number: 42573586 NR Desc: 26S proteasome regulatory subunit
  misc_feature: Homolog of GI Number: 9758666 NR Desc: 26S proteasome subunit
  misc_feature: Homolog of GI Number: 37681915 NR Desc: proteasome 26S subunit
  misc_feature: Homolog of GI Number: 41055644 NR Desc: similar to proteasome
  misc_feature: Homolog of GI Number: 73982052 NR Desc:  similar to 26S proteasome non
  misc_feature: Homolog of GI Number: 61372825 NR Desc: proteasome 26S subunit 13
MLQAFNSGNLALYQELCRVHNAALTAQPALVQNERKLLEKINILCLMEIIFSRPSEDRTIPLSVIAERTKLSISDVECLLMKSLSVHLIEGIIDEVDSTVHVSWVQPRVLGIPQVKALRDRLDAWVGKVHTTLLSVEAETPDLVAV

SEQ ID NO: 10735 - DNA, 1028 bp, Zea mays
  misc_feature: Ceres CLONE ID no. 1671417
  misc_feature: Ceres CDNA ID no. 36707585
  CDS (214)..(771): REFERENCED BY SEQ ID NO: 10736
agcaggggtcgcgtcgcgtgggggaaacgccgccgaaaaccactgggtgcccgctctcgctcggcacgtcccgcgcgcgcccacgcccacgcccacgcccacgactggtcacaagcgctagccagcgttcttcacgcgcctcgcgcctgcctgcagccgcaggggaatcgatcgtggcaagggcttgcagtcgcagctactggtagcagagcgatggcggccgcggcgagggtgtcggaggtgaaggccgagggcctcctgcggggcgcgtgcgcggcgctggccgcggcggccgcgctgctggtggggctcagcacgcagacggagacggtgctgctcgtcaggaagaaggccaccgtcaaggacgtccaggccctctgggtgctggccatggcggccgcggcagcggcgggctaccacctgctgcagctgctcaagtgcctctacctcggccgcgtcggcggcgcgcgcccctgccgccggagcagcagggctctggcctggacatgcctcctgctcgacaaggcgtgcgcgtacacgacgttcgcgacgacggtggcggcggcgcaggcgtgcgtggtcgcgctggacggcgcgcacgcggtgcagtggaccaagctctgcaacatctacacgcgcttctgcgagcaggtcgccggcagcctcgtgctcgggatgctggccgccgtcggcaccgccgtcctctcggccgcctccgcgcgcaacgtcttccgccactactcgtcgttggagacctacgccgcgcactaggctcgcggcccaaggcgtcgtcagctgggccgggtgcgccactcctctaaaacactgggccgtaacgaatttcaggcccagatgaagggtgacctgggctattaaagctggagctagtagagttctactccagagtgtactcctgcctacagtcctactgctctctccctccctctcgaagaggtgtgtacttttatttttcttttgcttctgttgcatttgatacattagtgaagacatgagtatgtaaaaaaaaa

SEQ ID NO: 10736 - protein, 185 aa, Zea mays
  misc_feature: Ceres CLONE ID no. 1671417
  misc_feature: Ceres CDNA ID no. 36707585
  misc_feature: Homolog of GI Number: 51536393 NR Desc: integral membrane protein
  misc_feature: Homolog of GI Number: 50252057 NR Desc: integral membrane protein
  misc_feature: Homolog of GI Number: 57282656 NR Desc: putative membrane protein
  misc_feature: Homolog of GI Number: 66776365 NR Desc: PE
  misc_feature: Homolog of GI Number: 66780099 NR Desc: PE
  misc_feature: Homolog of GI Number: 66778899 NR Desc: UvrD/REP helicase
  misc_feature: Homolog of GI Number: 66777243 NR Desc: Ribonuclease PH
  misc_feature: Homolog of GI Number: 66778376 NR Desc: LigA
  misc_feature: Homolog of GI Number: 66777445 NR Desc: LigA
MAAAARVSEVKAEGLLRGACAALAAAAALLVGLSTQTETVLLVRKKATVKDVQALWVLAMAAAAAAGYHLLQLLKCLYLGRVGGARPCRRSSRALAWTCLLLDKACAYTTFATTVAAAQACVVALDGAHAVQWTKLCNIYTRFCEQVAGSLVLGMLAAVGTAVLSAASARNVFRHYSSLETYAAH

SEQ ID NO: 10737 - DNA, 1530 bp, Zea mays
  misc_feature: Ceres CLONE ID no. 1671544
  misc_feature: Ceres CDNA ID no. 40041551
  CDS (476)..(901): REFERENCED BY SEQ ID NO: 10738
agccgcattaacaccaagaacagaagagaggaagagacaccgcaaccgcattaccatgagagagagctaggggggcctggcctgctgcccctgcatcgtctgaccctgaagatggcggcagcagcatccatggcggcccgtagccgcgcgctcgttgcgagcaggaggaggatgggtggcccgccgcgtctcttggtcgtcagctgcgacgccaggacagcggatgcctactgctccctggtaggtatgctatgcatggtttttgttctgattgattaattagttagttagttagttaaaatgtgtgtcgatatatatacatctgctgcaggccgcaaagattttgggacctcccacgaccttcaatgcagcgaagctcaaggtggagttcgccggggaggagctccggcctcctttccccagagcctacactctgacccactgcgacttgacggcgaacctgacgctgggcgtgatgagtagcgagcagctgcgcaagtcgacgctgcagagggacgacgtggtggcagagtggaaggaaaccgccggggagatgacgctgcaggtgcattgcttcgtcagcggcgccaacctcctgcaggagctggccgcaggtttcagatactacgtcttctccaaggagctaccgctggtcctcaaggcggtggttcatggcgacgccgctctgttcgccgacaggccggagctgatggaggccaaggtgtgggtgcacttccactccagctctcgcaagtacaaccggttagagtgctggggcccgctctgggaggctgccacaactaccaggaggaaccaccacctgctggagctggaccaactgcagagcgccatcaccaagaagaagactatctttaacgccctgctcgcccttctcctctgattttgattcagccgcctatacaatgaacggacggactatagagtgatcaagcaaacccaccaagcattctgcatctctgtctgactgtaatggttgctgctttgtctggggattatattattcatataatcatcatcagaaaaagcattgtattgcataaacgatagacccagcccagagatgcagcaaaaagagcagacttgattgatgctagtcacaacccagtgactaaagctattcaaaacactttacttttgccgagcacagactctccatgtcttggatcagtcatccaaggaaatcacttcagtgcccccctccttcagccccttctcagcagaagtcagcttctcgtccagctcatttatctgcctccttatcttctcaccaccatctggtagcttcgacaacagcacctacattcaattcaacaatttattttacactcaaaaaaaaaaaaaaaaaaaaaaaaaaaaaaaaaaaaaaaaaaaaaaaaaaaaaaaaaaaaaaaaaaaaaaaaaaaaaaaaaaaaaaaaaaaaaaaaaaaaaaaaaaaaaaaaaaaaaaaaaaaaaaaaaaaaaaaaaaaaaaaaaaaaaaaaaaaaaaaaaaaaaaaaaaaaaaaaaaaaa

SEQ ID NO: 10738 - protein, 141 aa, Zea mays
  misc_feature: Ceres CLONE ID no. 1671544
  misc_feature: Ceres CDNA ID no. 40041551
  misc_feature: Homolog of GI Number: 8778672 NR Desc: F9C16.20
  misc_feature: Homolog of GI Number: 58866283 NR Desc: senescence
  misc_feature: Homolog of GI Number: 50929913 NR Desc: OSJNBb0020J19.16
  misc_feature: Homolog of GI Number: 58866287 NR Desc: senescence
  misc_feature: Homolog of GI Number: 58866293 NR Desc: senescence
  misc_feature: Homolog of GI Number: 58866291 NR Desc: senescence
  misc_feature: Homolog of GI Number: 68510418 NR Desc: senescence
  misc_feature: Homolog of GI Number: 58866285 NR Desc: senescence
  misc_feature: Homolog of GI Number: 59506606 NR Desc: senescence
MSSEQLRKSTLQRDDVVAEWKETAGEMTLQVHCFVSGANLLQELAAGFRYYVFSKELPLVLKAVVHGDAALFADRPELMEAKVWVHFHSSSRKYNRLECWGPLWEAATTTRRNHHLLELDQLQSAITKKKTIFNALLALLL

SEQ ID NO: 10739 - DNA, 1394 bp, Zea mays
  misc_feature: Ceres CLONE ID no. 1672292
  misc_feature: Ceres CDNA ID no. 40041552
  CDS (141)..(1070): REFERENCED BY SEQ ID NO: 10740
cccctagaaaaagcccggctgcccgcctccctccctccctctatatcctcccctccgccaccgccccccctctctctcctcagctcaccagacgccgccgccgcgaacgacgaatcctcagcctcccagtcccagcccagatgttcctcgccgacaagtacaggtcgctgctgccctcctcccaccagcagccccactccaagcccagccgccgccgccagcagcagcagcagctgctgcagcaggagggggaggcggaccggttcggcgcggcgcgcctcgggagcctgcttcctttgccggcctccccgctcgcggcgctcgcgcgggtggccgacgtcctcgcgctcacgctcgccgacgcgggccccgcgctcgccggcgccgaccctgccgtcgccgcccacctcgacgcgggcgtcgcgctcctcgacgcctgcaacgccatatccgcgggcctcgaccgcctccgcaggcgcctcctcctcgcgcgcctcgcgctccacctcgtcctctccccctccccctccggggggcgagcacgcgcgcgcgcggcgctcgcggaccgcggcgaccacccggcgccgtccccgctcccttcgctcccgttcgagcagccccgcgggcggctctcggccgccgcgcgcgtcctcgccgccgtggacgccatctcctcgctcgcggcagcggccgcggccgccgtcctcgtcggaggacccgtcactttcccccgggtatccggcggcgtcggcgacctcccctgggcggagccgttcaacgcggtgtccggccagctcgcggcgctcggcgacggcgaggtggcatcgttagacgaggccgtccggaggctcgcgtcggcgctggacgcctccggcgagggtgctgccgacgacgaggcggccgtgcgcgctgcggcgcaggaggcggagaggcgcgccgaggaggtcgcgccgctgctggaccacctgtctgacgccgtcggcggcgtgttccgcgccgcgctgggcctccgcaacgccgaggtggactccttcatggtgggacccgcgggtaagccgtgtagcacataaccgtcgcttcgtgtggactactcgtagctgtctgtctgtatagtgtatacagtagtgtactgtgataggggtactgctacagctcagtggagagttgagtcgtgcagtggatcagtggaaatcatgtatgttagtgtcaacgacgaggatgaggccacagatcatacatgcactagttgcatcatcttgggtacgtggcatcctgtgctgtacgggaaggggagaacgttgcaatctggccgtgcagtttcgcggcacgtaacaacaacagtatgtgtgtataatttgtggagaaaaaaaaaaaaaaaaaaaaaaaaaaaaaaa

SEQ ID NO: 10740 - protein, 309 aa, Zea mays
  misc_feature: Ceres CLONE ID no. 1672292
  misc_feature: Ceres CDNA ID no. 40041552
  misc_feature: Homolog of GI Number: 50929583 NR Desc: OSJNBa0018M05.6
  misc_feature: Homolog of GI Number: 67986009 NR Desc: Recombination protein O
  misc_feature: Homolog of GI Number: 66778264 NR Desc: LigA
  misc_feature: Homolog of GI Number: 72547041 NR Desc: proteophosphoglycan ppg1
  misc_feature: Homolog of GI Number: 66776365 NR Desc: PE
  misc_feature: Homolog of GI Number: 66776103 NR Desc: LigA
  misc_feature: Homolog of GI Number: 67984635 NR Desc: Exodeoxyribonuclease V
  misc_feature: Homolog of GI Number: 72547023 NR Desc: proteophosphoglycan ppg4
  misc_feature: Homolog of GI Number: 66779656 NR Desc: Insulinase
  misc_feature: Homolog of GI Number: 72547036 NR Desc: proteophosphoglycan 5
MFLADKYRSLLPSSHQQPHSKPSRRRQQQQQLLQQEGEADRFGAARLGSLLPLPASPLAALARVADVLALTLADAGPALAGADPAVAAHLDAGVALLDACNAISAGLDRLRRRLLLARLALHLVLSPSPSGGRARARAALADRGDHPAPSPLPSLPFEQPRGRLSAAARVLAAVDAISSLAAAAAAAVLVGGPVTFPRVSGGVGDLPWAEPFNAVSGQLAALGDGEVASLDEAVRRLASALDASGEGAADDEAAVRAAAQEAERRAEEVAPLLDHLSDAVGGVFRAALGLRNAEVDSFMVGPAGKPCST

SEQ ID NO: 10741 - DNA, 968 bp, Zea mays
  misc_feature: Ceres CLONE ID no. 1673197
  misc_feature: Ceres CDNA ID no. 29191476
  CDS (125)..(736): REFERENCED BY SEQ ID NO: 10742
aaaccaccgcgctccggctctccccaattctaagcgagacggggcacaggaagaggagagcctaaaaccctaaccccccgaatcggatccggccgccggagcgcggaaccccaccccggccgccatggagatgggagggatgagcgacgctgagcggctgttcttcttcgagatggcctgcaagaactccgaggtcgcgtacgagcagaaccccaacgacgccgacaacctgacgcggtggggcggcgcgctgctggagctgtcgcaggtccgaaccggccccgacagcctcaagcttcttgaagatgcggaagccaaactggaggaggcacttcaaattgatcccaacaagtccgatgcactctggtgcttgggaaatgctcagacctctcatggattcttcactccagacaatgcaatagctaatgagttctttacaaaggcaaccggatgtttccagaaggctgttgatgtggaacctgcaaatgagctgtacaggaagtctctagacttgtcaatgaaggcacctgaactgcatttggagatccagaggcaaatggtttctcaagcggcaacacaagcatcctcagcctcaaatccaaggcaatcaaggaagaagaaggacaatgacttctggtacgatgtttgtggatgggtgatccttggcgccggcattgttgcttgggttggattggcaagagcaagcatgcctcccccgacgccaccagccaggtgagaactgatcgagtgacgagtgccaagaacgctttgcaaatgatggcatgcctatattaaggtgtcccagaaccttctaggtgctagtgttgtatggagaggagagaggtgtttccatacggtttgctcaaattttcatgcttgttcttttcgagcctcatgtgctgctggatagttttgtactttgcttaccttgataccgttttgaggcaaaataaaaaaaaaaaaaaaaa

SEQ ID NO: 10742 - protein, 203 aa, Zea mays
  misc_feature: Ceres CLONE ID no. 1673197
  misc_feature: Ceres CDNA ID no. 29191476
  misc_feature (9)..(201): Pfam Name: TOM20_plant PFAM Desc: Plant specific mitochondrial import receptor subunit TOM20
  misc_feature: Homolog of GI Number: 57899435 NR Desc: putative TOM20
  misc_feature: Homolog of GI Number: 19386800 NR Desc: putative mitochondrial import receptor subunit TOM20
  misc_feature: Homolog of GI Number: 1524370 NR Desc: TOM20
  misc_feature: Homolog of GI Number: 9802543 NR Desc: F17L21.18
  misc_feature: Homolog of GI Number: 30689902 NR Desc: mitochondrial import receptor subunit TOM20
  misc_feature: Homolog of GI Number: 11044961 NR Desc: TOM20
  misc_feature: Homolog of GI Number: 21592649 NR Desc: putative TOM20
  misc_feature: Homolog of GI Number: 19310823 NR Desc: putative TOM20 protein
  misc_feature: Homolog of GI Number: 22655340 NR Desc: At5g40930/MMG1_2
  misc_feature: Homolog of GI Number: 9279630 NR Desc: TOM20
MEMGGMSDAERLFFFEMACKNSEVAYEQNPNDADNLTRWGGALLELSQVRTGPDSLKLLEDAEAKLEEALQIDPNKSDALWCLGNAQTSHGFFTPDNAIANEFFTKATGCFQKAVDVEPANELYRKSLDLSMKAPELHLEIQRQMVSQAATQASSASNPRQSRKKKDNDFWYDVCGWVILGAGIVAWVGLARASMPPPTPPAR

SEQ ID NO: 10743 - DNA, 767 bp, Zea mays
  misc_feature: Ceres CLONE ID no. 1673718
  misc_feature: Ceres CDNA ID no. 40352074
  CDS (249)..(536): REFERENCED BY SEQ ID NO: 10744
agcgagtccacaccttatctaccgtgcttgtctctttttctttatttacacatgcatttattttgcctcttattgcattatgcccctttcaggatgaaagatgctcgaagttgaaaatatacccaatactgcagaaggtttaccttgaaagaattttgaggaaaccagaaattgatgcatttgcagaggagcttaggccgcatcaaaaagctttattaccagataagtcgactgtgcttgaccgagcaatgatcgagcataatctccttagtgccagtaaactttacacaaatatcagctttgatgagcttgggacattactggggattgatccaaggaaggctgagaagatagcatctcggatgatttatgaggatagaatgcggggctcaattgatcaggttgaggctgtgatacattttgatgatgacacggaagagctgcagcaatgggatcagcagattgctggactgtgccaagccctgaacgacatccttgacagcatgtcaagcaagggaataactattccggtgtgaataaatatctcatgctgtcggtcgatggtgcatggcagaactgcttacatgccccggaatctagaatcaacattttgtatagtttgcagctgcaaatgtgtatcttgtgattttggggggaggatgcttgtttaagtaacgctcactggataccttgtagcactactgtttcaagagcgctcgaatgattcagtaagggctttcggtttcaaagaaaaaaaaaaaaaaaaa

SEQ ID NO: 10744 - protein, 95 aa, Zea mays
  misc_feature: Ceres CLONE ID no. 1673718
  misc_feature: Ceres CDNA ID no. 40352074
  misc_feature (1)..(60): Pfam Name: PCI PFAM Desc: PCI domain
MIEHNLLSASKLYTNISFDELGTLLGIDPRKAEKIASRMIYEDRMRGSIDQVEAVIHFDDDTEELQQWDQQIAGLCQALNDILDSMSSKGITIPV

SEQ ID NO: 10745 - DNA, 1084 bp, Zea mays
  misc_feature: Ceres CLONE ID no. 1673883
  misc_feature: Ceres CDNA ID no. 36707586
  CDS (85)..(798): REFERENCED BY SEQ ID NO: 10746
actcgtccgacacacacacacacataacaacgagcagcacagctcacgctcggctacgactacgactacgatccgcgcgcgtcgatggcgatgagtgacaccggctcgagcttcgcgcagtgggccgcgctctaccaccaccacgaccccgccggcggcccggtcctgcccgacgacgacgctggcatcggcagcggcagcggcaccgccaccgccgcgagcccgacgtcgggagggtccagcggcgggagccccaccaccaaggcagcgtgggggcagcagcatctgcttcacggggtggaggggccccgggtcgccgggaagccggcggcggcgcggcggcggtcccgcgcgtcgcggcgggcgcccgtgacgctgctcaacacggacgccgccaacttccgcgccatggtgcagcagttcacgggcgtccccgcgcccctcgccggcgcgttcagggtcggggacggggccccggtcatcagcttcgccgccgactacggcttcccgcccgcttcttcttcctcggccgtcaacgtgtccttcttcgaccaccagctccaccggagccaacaacaccctgcagcgccgccggtccacaggcagcagcagcagtacgccggcgcgtcgccgttcggcggctacagcagcggcctggtgcaaggcggcggcgcaagcgacgtcttccccgcgtcggcggaggacaggatgctcctgcagagcattctggccgcccagatgccgcacatgccgccggtgtccggcgctaacaccagctctcatggcttctttgcttgaataagtaagtagctgaccaaggtactacgacggcgtcatccatgccagtatgccacatgcatggaagctagagaacatgggggagatggagtgaggattagcagcctagcagtagcaaagaagaagaagaagaaggggtaatcacaagtttccctggttgcgtttgattagttttcttatccgcgcgcgcagcttcatttgtttctccgctagctgcagcgatgtaaatatctttatcttgtttttaaaagatgcagtagtctctgtacaaaaaaaaaaaaaaaaa

SEQ ID NO: 10746 - protein, 237 aa, Zea mays
  misc_feature: Ceres CLONE ID no. 1673883
  misc_feature: Ceres CDNA ID no. 36707586
  misc_feature (92)..(122): Pfam Name: VQ PFAM Desc: VQ motif
  misc_feature: Homolog of GI Number: 2078483 NR Desc: antifreeze glycopeptide AFGP polyprotein precursor
  misc_feature: Homolog of GI Number: 66778899 NR Desc: UvrD/REP helicase
  misc_feature: Homolog of GI Number: 67987177 NR Desc: 4Fe
  misc_feature: Homolog of GI Number: 66778264 NR Desc: LigA
  misc_feature: Homolog of GI Number: 56283929 NR Desc: CG3047
  misc_feature: Homolog of GI Number: 72547023 NR Desc: proteophosphoglycan ppg4
  misc_feature: Homolog of GI Number: 66776103 NR Desc: LigA
  misc_feature: Homolog of GI Number: 71367849 NR Desc: similar to Methylase involved in ubiquinone/menaquinone biosynthesis
  misc_feature: Homolog of GI Number: 11359723 NR Desc: proteophosphoglycan
  misc_feature: Homolog of GI Number: 72547041 NR Desc: proteophosphoglycan ppg1
MAMSDTGSSFAQWAALYHHHDPAGGPVLPDDDAGIGSGSGTATAASPTSGGSSGGSPTTKAAWGQQHLLHGVEGPRVAGKPAAARRRSRASRRAPVTLLNTDAANFRAMVQQFTGVPAPLAGAFRVGDGAPVISFAADYGFPPASSSSAVNVSFFDHQLHRSQQHPAAPPVHRQQQQYAGASPFGGYSSGLVQGGGASDVFPASAEDRMLLQSILAAQMPHMPPVSGANTSSHGFFA

SEQ ID NO: 10747 - DNA, 1094 bp, Zea mays
  misc_feature: Ceres CLONE ID no. 1673991
  misc_feature: Ceres CDNA ID no. 40352075
  CDS (149)..(868): REFERENCED BY SEQ ID NO: 10748
actccctccccccatgcgcttgcttcgactcctcctccattccttcctctctctctctccctctcccgcggcggcggggagggggtgagccgtaaaggagccggctttcgtagctcttcctgggagtgaccttctccgacgaaacgaaatggcccatcaaggaccaggagtgcctaagtttggaagctgggaggatgagggcgatcacccctacacacagtacttcgaaaacgctcgtaagggcaaatctccaggcagatctgctactcagaacgagcacagaactggagatccggaagcgctcttcaaagaagacacgacgccatctgctaaagcttctcccctgcggactgggtcggaggatcctgtggcgccaaagcccaaggacgcggcctttgctcgaggcaagccgtatgctgagccagcaacccataaacacggtgctaataccagctatgaaagaaaaaccggcatggagagatcgcctctgcatcctcaccaccaagcaaggctcgtaaacagaggaggggtttcgtctccttcatgggaacgcaggggttcgtcagaaggaaaccgtggagctgcgcccaccacacctgggaggtcgtccaaaatgaggccaggcggccgtggagacgagacgcctgagagaggatctgccgtgcccaagtttggagaatgggacgagaaagatccctccacaggtgaaggcttcaccgacatatttaacaaggtgagggaggagaagcagtccggcgatgctcctgtcatcaccagcggcaacgcaggtggtggttatagccgctccaaccaaggccgcaaatacgaatcttcagcttgctcatgcttcagttggttcaggaactgatgcttccttgcatggttgctgatgcttcagctggttcagcagctgataggtgccgttgaagatttggatgaaccagtgccgatcgtatcattttcacatgagctgtagtcccatcgtgttctccctgttgtgataatgtgtggtagcaggacgtgccagaacttgactttgagaagctgcggttcagtagtttgagctgttcttgcaacaaaaaaaaaaaaaaaaa

SEQ ID NO: 10748 - protein, 239 aa, Zea mays
  misc_feature: Ceres CLONE ID no. 1673991
  misc_feature: Ceres CDNA ID no. 40352075
  misc_feature (165)..(207): Pfam Name: NOI PFAM Desc: Nitrate
MAHQGPGVPKFGSWEDEGDHPYTQYFENARKGKSPGRSATQNEHRTGDPEALFKEDTTPSAKASPLRTGSEDPVAPKPKDAAFARGKPYAEPATHKHGANTSYERKTGMERSPLHPHHQARLVNRGGVSSPSWERRGSSEGNRGAAPTTPGRSSKMRPGGRGDETPERGSAVPKFGEWDEKDPSTGEGFTDIFNKVREEKQSGDAPVITSGNAGGGYSRSNQGRKYESSACSCFSWFRN

SEQ ID NO: 10749 - DNA, 1396 bp, Zea mays
  misc_feature: Ceres CLONE ID no. 1674566
  misc_feature: Ceres CDNA ID no. 40041553
  CDS (121)..(975): REFERENCED BY SEQ ID NO: 10750
agctccattccctcactgcccagttgggcggccttcaaaacgcagcctctctctctctctctctctgtaagacgggaaactccagcacatagtaattggtaactagctaggtagaagaagatgagctcgtcgatcagcatgatggaagcgagaatgcctccgggtttcaggttccaccccagggatgacgagctcgtgatggactacctcctacaaaagctctccggccatggccaccacgccggcgctgccatcgtcgtcgacgtcgacctcaacaagtgcgagccatgggacctcccagattccgcgtgcgtgggtgggaaggagtggtacttcttcagcctgcgcgaccgcaagtacgcgacggggcagcgcaccaaccgcgccacgcactccggctactggaaggccaccggcaaggaccgcgccgtcgtcgccggcggcgaggatgcggtggcggtggggatgcgcaagacgctggtcttctaccggggccgcgcgcccagggggaggaagacggagtgggtcatgcacgagttccgcctccacccccatgccgcgccgtgcctgctaccagcagctgcggcaaacaaggaggactgggtgctatgcagggtgttctacaagagcagaacaaccacgccaaggccagaatctgaagacgcccgggacggcaccccatcagctgagtcgcaactgccggctgccctgccgcttgcgcccctcgctgacacctacgccgccccaacggttgcagagaaggtgtactgcttatccggtctgccggaactgccattcagaagaccagtgagccttggggaccttctggcgttcgaggcatctgagaaggagtctgtcacgacagtgatgaccagtgtctcgaacaacactagttcagtgctggagctgactccaaattgcaactggaaccaggaaaatggcatgtcacggatgtggagcccccttgggatatgagatagatctgtgttgtttgctggatctggatgtatggagtcttagtactgagtggccagtagggttctgctgcttagatttgattagcagtgtgacttgcagattgtgtagattagattatccgttattggactaatggcttggcgtagtatttgtacatattgctactgaaggaacagtgtccttatccttgtttggcgtagtatttgtacatagcacctgctaaacttcagacaatcagtgaaagacaaatgtgtacattgtaacatagtgttaagaaactctgagagttgctaaaaaaaaaaaaaaaaaaaaaaaaaaaaaaaaaaaaaaaaaaaaaaaaaaaaaaaaaaaaaaaaaaaaaaaaaaaaaaaaaaaaaaaaaaaaaaaaaaaaaaaaaaaaaaaaaaaaaaaaaaaaaa

SEQ ID NO: 10750 - protein, 284 aa, Zea mays
  misc_feature: Ceres CLONE ID no. 1674566
  misc_feature: Ceres CDNA ID no. 40041553
  misc_feature (12)..(143): Pfam Name: NAM PFAM Desc: No apical meristem
  misc_feature: Homolog of GI Number: 50942075 NR Desc: putative NAC domain protein NAC1
  misc_feature: Homolog of GI Number: 52076897 NR Desc: putative NAC domain protein NAC1
  misc_feature: Homolog of GI Number: 15148912 NR Desc: NAC domain protein NAC1
  misc_feature: Homolog of GI Number: 21554126 NR Desc: NAC1
  misc_feature: Homolog of GI Number: 77556571 NR Desc: salicylic acid
  misc_feature: Homolog of GI Number: 50905479 NR Desc: putative NAC domain protein NAC1
  misc_feature: Homolog of GI Number: 34558777 NR Desc: salicylic acid
  misc_feature: Homolog of GI Number: 15795128 NR Desc: NAM
  misc_feature: Homolog of GI Number: 50901586 NR Desc: putative OsNAC1 protein
  misc_feature: Homolog of GI Number: 50253299 NR Desc: putative OsNAC1 protein
  misc_feature: Useful for delaying flowering time
  misc_feature: Useful for increasing chlorophyll and photosynthetic capacity
  misc_feature: Useful for making plants with enhanced abiotic stress tolerance
MSSSISMMEARMPPGFRFHPRDDELVMDYLLQKLSGHGHHAGAAIVVDVDLNKCEPWDLPDSACVGGKEWYFFSLRDRKYATGQRTNRATHSGYWKATGKDRAVVAGGEDAVAVGMRKTLVFYRGRAPRGRKTEWVMHEFRLHPHAAPCLLPAAAANKEDWVLCRVFYKSRTTTPRPESEDARDGTPSAESQLPAALPLAPLADTYAAPTVAEKVYCLSGLPELPFRRPVSLGDLLAFEASEKESVTTVMTSVSNNTSSVLELTPNCNWNQENGMSRMWSPLGI

SEQ ID NO: 10751 - DNA, 1070 bp, Zea mays
  misc_feature: Ceres CLONE ID no. 1674632
  misc_feature: Ceres CDNA ID no. 40352076
  CDS (237)..(731): REFERENCED BY SEQ ID NO: 10752
atatcacaggaaagtggcagttggtctttgctctcagctgccttgcaagcctgagctcttttatctttggatgtgcagcgcaaatatgttgtagtattacatttatccacatcattccactgtatcttgcagatgcagctgtatcttgatttgacattgccctcttttgatttttttggcctctggtatgccttcggccttctgaaaacagtttattttatttgataaagcttatcatgagtggagatattgactctacattcaaaagacttggggagtggtatccacaagtgataaaggatgagaaatcggttatttgcttactactccattctcaaagattcatagaatatatcagggctgaacaactggaagatgctgtgcactatggtcgtgctaacctggcaagcttcttgacacacgaagcttttgagtggctgctgaaggatagtgtggccctgctggcgtacgagaagcctgcagaatcatgcttgggatacctgatgggctctccccagcgtgaattcgtggcagacgcagtgaacgcggctgtcctgtcgacgaaccctaccatgaaggaccctgagagctgcctctactcgtgtctcgagaggctactaaggcagctcacagtttgtagccttgagcgacgtgcattcaacaacgaccaaggagatgcattcttactccacaaagaaatgcaaaactatgaaaggtctaggcgctcatagcctcataggcatcaggattgttgcgcttctgaagtaaactcggttcgggtgttagacctcctcatctgccgtttgaagggacgaagattcaatgacaagcacgtatccttccctttgcaggtctgcagcgcccctcagctttcgcaagggtgagcaccgaattgcatggacacagctcaggcgcttcgggaggtgttctaacctctctgtaatcagaaaactcacagtgagataaagccaacgtttcagatttcccctattttgttggttggctaatatgctgtttgacactatgaatgctaaaaagtaaagacgcttcgacaaaaaaaaaaaaaaaaa

SEQ ID NO: 10752 - protein, 164 aa, Zea mays
  misc_feature: Ceres CLONE ID no. 1674632
  misc_feature: Ceres CDNA ID no. 40352076
MSGDIDSTFKRLGEWYPQVIKDEKSVICLLLHSQRFIEYIRAEQLEDAVHYGRANLASFLTHEAFEWLLKDSVALLAYEKPAESCLGYLMGSPQREFVADAVNAAVLSTNPTMKDPESCLYSCLERLLRQLTVCSLERRAFNNDQGDAFLLHKEMQNYERSRRS

SEQ ID NO: 10753 - DNA, 964 bp, Zea mays
  misc_feature: Ceres CLONE ID no. 1674728
  misc_feature: Ceres CDNA ID no. 25892930
  CDS (82)..(723): REFERENCED BY SEQ ID NO: 10754
aacaattcagaagcgccgacccgcgtcgccttatcgggagcaacggcaacggcagcctctcctccgcgccatcaggcagccatgggtccgggcgcgtccacctccgcgcagccgctgtcccggctcctcctcagcctcccgaagccaggcgccgcgaagcacccccgctcctcctcctcctcctcctctccttcgcagcctcgcccggacgtcgccgcggccaggagccccggcctcgtcctccggcggcgcgaggcagcggccgccctgctgtcgaccgcctttctctcccgcttcgccctccccgcggccgccgcggacggcggggagtgcccgctggaggtggcgccgtccgggctcgccttctgcgaccgcgtcgtcggcaccggcgccgccgcccaggagggacagctcatcagggcgcattacacggggaggctggaggacggcacggtgttcgacagcagctacaagcgcgggaagccgctcaccttccgcgttggcgtcggagaggtgatcaaaggatgggatcagggtattgttggcggcgaagggatcccgccgatgctcgctgggggtaagcggacgctgaagctgccaccggcgctggcctacggcgagaagggtgctgggtgcagagggtgggagcccacctcgtgcgtcatcccgccgaactccacgctcctcttcgacgtcgagtacgtcggcagagccaccggctgaggtctccggaaactctgaaagtctgaatgcgcgaggccaaggttcagactgatccatgtggacaacgatcgtagttgcccgggcactaagaggttttcttcttctcgtcgtatgtttaagagagctatagattgccagagacaagagtctatatagttttcaatgtcgtgaaaggtgtagagaaatgtgccaaaagaagctacaaaaatgctgacccagttccgaaaaaaaaaaaaaaaaa

SEQ ID NO: 10754 - protein, 213 aa, Zea mays
  misc_feature: Ceres CLONE ID no. 1674728
  misc_feature: Ceres CDNA ID no. 25892930
  misc_feature (101)..(208): Pfam Name: FKBP_C PFAM Desc: FKBP
  misc_feature: Homolog of GI Number: 52075930 NR Desc: putative peptidyl
  misc_feature: Homolog of GI Number: 21535744 NR Desc: FK506 binding protein 1
  misc_feature: Homolog of GI Number: 55670206 NR Desc: Chain E
  misc_feature: Homolog of GI Number: 6686798 NR Desc: FKBP like protein
  misc_feature: Homolog of GI Number: 50912833 NR Desc: putative FKBP
  misc_feature: Homolog of GI Number: 6686802 NR Desc: FKBP like protein
  misc_feature: Homolog of GI Number: 46130465 NR Desc: COG0545: FKBP
  misc_feature: Homolog of GI Number: 16329650 NR Desc: FKBP
  misc_feature: Homolog of GI Number: 22298646 NR Desc: FKBP
  misc_feature: Homolog of GI Number: 48890665 NR Desc: COG0545: FKBP
MGPGASTSAQPLSRLLLSLPKPGAAKHPRSSSSSSSPSQPRPDVAAARSPGLVLRRREAAAALLSTAFLSRFALPAAAADGGECPLEVAPSGLAFCDRVVGTGAAAQEGQLIRAHYTGRLEDGTVFDSSYKRGKPLTFRVGVGEVIKGWDQGIVGGEGIPPMLAGGKRTLKLPPALAYGEKGAGCRGWEPTSCVIPPNSTLLFDVEYVGRATG

SEQ ID NO: 10755 - DNA, 1189 bp, Zea mays
  misc_feature: Ceres CLONE ID no. 1674836
  misc_feature: Ceres CDNA ID no. 35383527
  CDS (136)..(768): REFERENCED BY SEQ ID NO: 10756
aatcatatttatatatatccaatccttcccacatcgcatccatccgctcagctcgatcgaacttcgcacacgcgtacattaattctcaggaacgtactggttggtggtggtagtagctactagctactataaactatggaccagatgctgggcaagcacctgcagatgccttccgtgactacgagcgccgcctgccagcagccgcagtcgccgccgccgtcgccgcagcagcagcagcagtaccggggcgtgcggaagcgcaagtggggcaagtgggtgtcggagatccggcagccgggcaccaagacgcgcatctggctcggcagcttcgagtcggccgagatggccgcggtggcgcacgacgtggcggcgctgcgcctgcggggccgcgacgcgcagctcaacttcccgggctgcgtcgcctggctaccccgcccggcgacctcgcacgcgcgcgacgtccgcgccgcggcggccgaggccgccgaccgcgtgcgctgcgacccggcgctgctgctgctccagcaggcggcggcggcgtcagcgcggtgccacgaccacaaccacgagttcggggccgggccggcgccggtggtcgagctcgggagcgacgaggagttcgagctggacctggactcgcccagcctctgggccgagatggccgaggccatgctcctggacccgccgggctgggccaccggcgtcgtcggcgacgcggcggaggtggccctgtgctggccacacggctccctctgggacgcctgctagctcggccaggcaccccggctctggctctgcctgcgagtgtttggccatggccgatgtggccaccggacgctgtttggtctcacaagtgtcgcagtgcttttggtgtgtgccactgtgagcgcgtctctgttgattctcccccgcgtgtggttttgctttacgtctgctgctgttgggcttgctgttttcgttcctgttatcatcttaccagtatcactaccattagctaggcaaaatgataacagtccagatcatctgaagacaaacaaaattagtacggctgtgccctgctgatactgatattatggtttggtctattcctgcattttgtactaatttgtgcagtcacattattcgagatgaccgtgcatgcaagtaccccacagaaaatgatcttgtattgtaaaaaaaaaaaaaaaaa

SEQ ID NO: 10756 - protein, 200 aa, Zea mays
  misc_feature: Ceres CLONE ID no. 1674836
  misc_feature: Ceres CDNA ID no. 35383527
  misc_feature (24)..(87): Pfam Name: AP2 PFAM Desc: AP2 domain
  misc_feature: Homolog of GI Number: 50924548 NR Desc: OSJNBa0058G03.2
  misc_feature: Homolog of GI Number: 50909483 NR Desc: putative AP2 domain
  misc_feature: Homolog of GI Number: 62733280 NR Desc: AP2 domain
  misc_feature: Homolog of GI Number: 50927599 NR Desc: OSJNBb0034G17.2
  misc_feature: Homolog of GI Number: 33637696 NR Desc: transcription factor Rap212
  misc_feature: Homolog of GI Number: 60593399 NR Desc: TmCBF7
  misc_feature: Homolog of GI Number: 48479402 NR Desc: putative AP2/EREBP transcription factor
  misc_feature: Homolog of GI Number: 77744832 NR Desc: Ap2/EREBP transcription factor
  misc_feature: Homolog of GI Number: 32455220 NR Desc: transcription factor
  misc_feature: Homolog of GI Number: 38564310 NR Desc: At1g71450
MPSVTTSAACQQPQSPPPSPQQQQQYRGVRKRKWGKWVSEIRQPGTKTRIWLGSFESAEMAAVAHDVAALRLRGRDAQLNFPGCVAWLPRPATSHARDVRAAAAEAADRVRCDPALLLLQQAAAASARCHDHNHEFGAGPAPVVELGSDEEFELDLDSPSLWAEMAEAMLLDPPGWATGVVGDAAEVALCWPHGSLWDAC

SEQ ID NO: 10757 - DNA, 1079 bp, Zea mays
  misc_feature: Ceres CLONE ID no. 1674897
  misc_feature: Ceres CDNA ID no. 35383528
  CDS (1)..(837): REFERENCED BY SEQ ID NO: 10758
aactgctcgagctcagctcaagtaaccacagaaaatggcgtcacttctccgccctctcgtcctcgtgctcctgatcgcctcctgcacagcgcagcagtcaccgccggcgcagcccccgccaacgccgaacgcgccaccggccaactcgccgccccaggcgcctccagccggcaacccgccgccggcaggcaacccgccacccgcgcccaccgccactccacctccggccccgaccactccgcccccggccccgaccactcctcccccggctcccacaacgccgcccccggcgccgacaactccacctccggcccccaccacgccgcctccgtccccaccagcgtcgccaccgcccgctcccaccactccgccaccgtctcccccggcaagcccgccgcccgctcccgccaccccgccaccgtctccgcccatggcgccacctcccgccacgccccctccacccgccaccccgccgccaccggccgcgcccacgccggccccgagcgtggccccgactcccccgcccgtggcgacaccggctgcgtcccccaagagccccaagacgccgagccccgccgccgcgacgtccccggcgccctcgctctcgcccgcgggcacgccgacgaacgaggactcgggtgcaagcgcgcgcgcggtcggcttcgccacggtggtggcgttggcgggcgcgggcctcgccgttctgctttgagtagtagactccgactcttcctcctgtcctcacgccgatgtcgtcacctcctccccgtgcctcgacgttgctgctcgctccatttcagtttcatcttttttttttcctttggtgttgttatttaattttaccggccctacgatcgattcttgatgtacacgatgatgatgatgatgcattggttgctttggatccgcgggcgggtggtggttagtgttctgcccgcgggtgtcgccatgtacttttaccgcactacattttggttctatagagaaaggatttgtgtatattctcgatttctcgtgcattatttctatggccgttgaataaaatctctgtgcagattcactctaaaaaaaaaaaaaaa

SEQ ID NO: 10758 - protein, 225 aa, Zea mays
  misc_feature: Ceres CLONE ID no. 1674897
  misc_feature: Ceres CDNA ID no. 35383528
  misc_feature: Homolog of GI Number: 76262500 NR Desc: pherophorin
  misc_feature: Homolog of GI Number: 76262498 NR Desc: pherophorin
  misc_feature: Homolog of GI Number: 6523547 NR Desc: hydroxyproline
  misc_feature: Homolog of GI Number: 21322711 NR Desc: pherophorin
  misc_feature: Homolog of GI Number: 12018147 NR Desc: vegetative cell wall protein gp1
  misc_feature: Homolog of GI Number: 41400381 NR Desc: minus agglutinin
MASLLRPLVLVLLIASCTAQQSPPAQPPPTPNAPPANSPPQAPPAGNPPPAGNPPPAPTATPPPAPTTPPPAPTTPPPAPTTPPPAPTTPPPAPTTPPPSPPASPPPAPTTPPPSPPASPPPAPATPPPSPPMAPPPATPPPPATPPPPAAPTPAPSVAPTPPPVATPAASPKSPKTPSPAAATSPAPSLSPAGTPTNEDSGASARAVGFATVVALAGAGLAVLL

SEQ ID NO: 10759 - DNA, 1022 bp, Zea mays
  misc_feature: Ceres CLONE ID no. 1674927
  misc_feature: Ceres CDNA ID no. 40352077
  CDS (500)..(736): REFERENCED BY SEQ ID NO: 10760
acaaggcatgaacatgtttcctcatctttctatatcacgaacaatgtgttgcgccataaaaagatgtttggatcagtcattattagacagggcaatcaactcaatgaatagaacaccaggaatcgtgataaaccgttctgaacccttgcagcctacaatcacaggagagattgagacacctgtagctgtagctagcgtagaatttattgatccaagagagcctgttctggtaagtctgtttcttaacactagatattgtacatgtcatttgtagtgtatctacaattatatttagtctttctactagcatgtctaacaggttattccaatactgagagctggtcttgcactagctgaacttgcttcatcagttctgccagccaccaagacttaccacctcggctttcgtagggatgaagaaacgcttcaaccttcaatatacctgaacaacctgccagacaagattccagagggtactcgtgtgctagttgttgacccaatgctggccactggtgggacaatggttgctgctattgacttgttaatcgagtgcggagttactagcaagcagattaaagttatatctgctattgcatcacctcctgccctgcaaaagctcaataacaagttccctgggctccacgtgtacacaggaatgattgatccagaagtaaatgagaaaggttttatagttccaggactgggggatgctggcgacagaagctttgccacataatcagactgcccaatttgattgggtcagtgttcgacctgcgagaatctttgcttgagtttcacagaaacggagcgactgccagtagcagtgtttattgctgtagattactttcgtttgagattttgttccttttttcagtgttatcagctgcctaccattttgtagcacccattctgtatgattgtgtagaatacaaggctagttcaaatgtccccagatggtaaaatgctcgagagaacaaggttccgttcaaaatgacggattattgaaaaaaaaaaaaaaaaaa

SEQ ID NO: 10760 - protein, 78 aa, Zea mays
  misc_feature: Ceres CLONE ID no. 1674927
  misc_feature: Ceres CDNA ID no. 40352077
  misc_feature (1)..(50): Pfam Name: Pribosyltran PFAM Desc: Phosphoribosyl transferase domain
MLATGGTMVAAIDLLIECGVTSKQIKVISAIASPPALQKLNNKFPGLHVYTGMIDPEVNEKGFIVPGLGDAGDRSFAT

SEQ ID NO: 10761 - DNA, 1140 bp, Zea mays
  misc_feature: Ceres CLONE ID no. 1675083
  misc_feature: Ceres CDNA ID no. 35383529
  CDS (78)..(926): REFERENCED BY SEQ ID NO: 10762
acttacaagcttgagatgttttgagtccggatgaactgatccttgtttcaaagttgtagtctgcccgctccggcgccatggctgcggcctccgaccgtggtgaggtcgacactgcacggcccttccggtccgtcaaggaggccgtagccgtgttcggacaccgcatacttgtcggcaacaaccattccagtcacagcagcactgcggccgccgccattgccagcccaagcgctagtgccaatgccactggcgttgctgccaccccgagtgccaagcatgaagcaagcagtagcagcagcaccatgaccttctctcccacaccaatggccgagagcgaggcggagattatacctgccactgtgcccttgtactcggcgccatcctcgccgccatctctcgcgtcgtcaccttcgccggtcaagccgtgcagcggtcaccgcggcgacgagtcagccggtggtctggtgatcgtgcgctcaatccagaagctggaggccgacgtggccgcgacgaggaaggagctggcgcagctcgggaagcgggggaacgagatggagaaggcgctcgtcagcctcagcgcgcagctccaccggggcctctcgaagctcgcggagatggaggccgacagggcggcgggacgcggccgcagcatcgcgtgcgacaccgacgtggcgtcgttctcgctccggagcgagcagtggggcgacaggctcgccgcgagcgagtacctgccgtccttctcccacgcgctgagcctcggcgagatggacgacgtggagctcatgggcggccagaggaggaaggcgcagaaggtcaagcccatcgtgccgcttatcggcgacatcctcttctccaggaggaagagcaccaaggagaagggtgatgacggctcctacagtggtgatctctacggcgtgctaggctaggctgatggtcagcgctaaattctgtgtgcagtgtgctcatctgtgtatcaagcatggcagcttgcattgttttttttttcttgttttgcttggctgttttctctattcttctgctgttattgcttgcgtggcttgtgcaggggagttgcatttgtgtaaatgtacaaacatgttgatataacctcaggtcatgaatgaaaaaaaaaaaaaaaaa

SEQ ID NO: 10762 - protein, 282 aa, Zea mays
  misc_feature: Ceres CLONE ID no. 1675083
  misc_feature: Ceres CDNA ID no. 35383529
MAAASDRGEVDTARPFRSVKEAVAVFGHRILVGNNHSSHSSTAAAAIASPSASANATGVAATPSAKHEASSSSSTMTFSPTPMAESEAEIIPATVPLYSAPSSPPSLASSPSPVKPCSGHRGDESAGGLVIVRSIQKLEADVAATRKELAQLGKRGNEMEKALVSLSAQLHRGLSKLAEMEADRAAGRGRSIACDTDVASFSLRSEQWGDRLAASEYLPSFSHALSLGEMDDVELMGGQRRKAQKVKPIVPLIGDILFSRRKSTKEKGDDGSYSGDLYGVLG

SEQ ID NO: 10763 - DNA, 963 bp, Zea mays
  misc_feature: Ceres CLONE ID no. 1675181
  misc_feature: Ceres CDNA ID no. 40352078
  CDS (153)..(548): REFERENCED BY SEQ ID NO: 10764
aattcgaccattccatcctttccttatcccctcccacttcgtctcccttcctggcttcctttcttcgccatggcaaccatgtccctccgctccctcgccatggccatggccgaagagaaactggccagagccgtgggtttggctttgttaccatgagcactgttgaggaagctgacaaagccattgagatgttcaaccgctatgatattagcgggaggcttctgaatgtaaacagggcatcttctaggggcactcgcatggaaagacctcagagacaatttgcaccagctttcagagcttatgttggcaacttgccatggcaagttgatgactctaggctggtgcagttgttcagcgagcatggagaagttgttgatgctaaggttgtctacgacagagaaactgggcgctcacgaggattcggttttgtatcaatggtgtcaaaggaggaactcaatgatgctatttcggccctagatggacaggaattggacggccgccctcttcgagtgaatgttgcagcagagcggccacagaggggcttttgatgcggttgtatgagagagatgactgcttgtttgtaatgagcatggagacacagagacacaatggactgaatggaggagcaatggtacaaattagcggaagcggatgctgtcacaagttgctagatctttctcccttagcttcttgacatttggttcttgccacagctttttgatgcttctcttggcagctggacttaatgttttgctattcttgtcgacatcacgagttgaattgtcaaactagtctcttatgttctatgctgatatgccttaaccagattctcagcatggcaaaatgttttgttggtgaaattaggggtggaaaaaaaaaaaaaaaaaaaaaaaaaaaaaaaaaaaaaaaaaaaaaaaaaaaaaaaaaaaaaaaaaaaaaaaaaaagaaaaaaaaaaaaaaaaa

SEQ ID NO: 10764 - protein, 131 aa, Zea mays
  misc_feature: Ceres CLONE ID no. 1675181
  misc_feature: Ceres CDNA ID no. 40352078
  misc_feature (3)..(26): Pfam Name: RRM_1 PFAM Desc: RNA recognition motif.
MSTVEEADKAIEMFNRYDISGRLLNVNRASSRGTRMERPQRQFAPAFRAYVGNLPWQVDDSRLVQLFSEHGEVVDAKVVYDRETGRSRGFGFVSMVSKEELNDAISALDGQELDGRPLRVNVAAERPQRGF

SEQ ID NO: 10765 - DNA, 965 bp, Zea mays
  misc_feature: Ceres CLONE ID no. 1675499
  misc_feature: Ceres CDNA ID no. 40352079
  CDS (103)..(633): REFERENCED BY SEQ ID NO: 10766
aatcctaatccgcttgctctgccagcaagtcagcaagaggcagcagcgccggcccctggccggcctcggctcagctggcgaaggccgtgaccgtgagaagccatgagtagggaacagcagatgccacggcggaggttcatcgccatccccttctcctccggctgccgctcccactccagcgtcgacgtcgtcgacactgggcgccacgccggcaacggcaagaagccccacccgcaaggggctgaagcaggggcggcggcggcgaggggcaagggggagtctctggtggcgcggctcctgcgggggttcaagaacctgtcgcagatcttcgcggtgtacgacgacgaggacgaggaggaggaggagcgggagatggtgatcggcctccctacggacgtgaagcacgtggcccacatcggctgggacggcgccacgagcaccagcagcaacctccgttcctggaaccgccccgcgccgcctccaccggcctcgtcgttccccgcgccccagcagcatccgcaggagcagtacccgctgcccctgccggcgctgtccatgcggcaggtcgagctggccatgggcgcccaggccgccggcggcgcaacgactgcggcccaccggcgtcacagctagcgccagacaaagcgagaggcggtggtggtacacgcctacgggccttggtgatgggctgggctgggctcgtccgtcagcctggcgtgacaggccgtcggcgtcgtccgtttctgccgccccatgctcggctcggctcccatcccatgtggagggaagagaagggtggggggagctggtcgtcggagttggtgcgtgcttcgtttgcttgtgctttggcgccatatcgctgcggagcgctgtacgtagccatttttcgccggggagggatcctcatcctcctcgttggcttgctatgtgttccttgccgccattaccaaaaaaaaaaaaaaaaa

SEQ ID NO: 10766 - protein, 176 aa, Zea mays
  misc_feature: Ceres CLONE ID no. 1675499
  misc_feature: Ceres CDNA ID no. 40352079
  misc_feature (92)..(139): Pfam Name: PBD PFAM Desc: P21
MSREQQMPRRRFIAIPFSSGCRSHSSVDVVDTGRHAGNGKKPHPQGAEAGAAAARGKGESLVARLLRGFKNLSQIFAVYDDEDEEEEEREMVIGLPTDVKHVAHIGWDGATSTSSNLRSWNRPAPPPPASSFPAPQQHPQEQYPLPLPALSMRQVELAMGAQAAGGATTAAHRRHS

SEQ ID NO: 10767 - DNA, 1225 bp, Zea mays
  misc_feature: Ceres CLONE ID no. 1675582
  misc_feature: Ceres CDNA ID no. 40041554
  CDS (117)..(704): REFERENCED BY SEQ ID NO: 10768
actcacagtcatagattcacgccgcggaacgcggattccaagaacccaagtgaatcgcggctcctcgagtccggcggtgccgtccggagaggtagagcctagagcacagccccgccatggcggccgcggcgcgcgcgatcatctgcgagctggcgccgcagaaggtgtcgtcgacggcgtcggggcccgcggcgccgaagaagcgtgacgccgggacgaaggtggtgctgcagccccgcctctgcacgctccggtcgtacggcgccggcagcggcgtggtgacgcggaggattctggccggggaggaggacggcagcgggggcgccgactcgggcggctccgcggcgttgccgttcttcgcctcgctcgctgactacatcgagagctcccgcaagagccaggacttcgagaccatctccggccgcctcgccatggtggcgttcgcggcggcggtggccgtggagacgacgacgggcagctccctgttcaagaagctggacaccatggagatcgaggaggcggcgggggtgtgcgtggcggtggtcgccagcgccgcggcgttcgcatgggcctccagcgcgcgcaataggatcgggcagatgttcacgctgggctgcaacgccttcgtcgactccctgatcgacaatatcgtcgaggcgctcttctccgagggcgagctgcaggactggtccgatgacatatgaacatgcacacgcatatatagagactaatagtagacagacagtaatacagtatacgtacatacatagagtcaactattaacagtaagacactaggtagatgaagttgttaagtgagttccatgcattttctcgcaagcttcgtcatcgctgcacaacggcaaggctgaatatttcagagatggatcgttgattagagctccgcattctgcttaggaacacaagcagggatgtctttcagaagtgaggcggctcttaaagccttcaaggttgtgaaatatgtagatctcttctcttgggagaaatagtggtatcctactatcctaggctctggaaagattggcccccagaattaactgtacctgctactagtactactagctataccgagtgtatttagagaatgaatcatgtaatcaaatccatgtaatgccaagtgtagtcagagtcaaatctggagtattgattcttgacattgtaccacatggagtggagatgagagcctataaaaaaaaaaaaaaaaa

SEQ ID NO: 10768 - protein, 195 aa, Zea mays
  misc_feature: Ceres CLONE ID no. 1675582
  misc_feature: Ceres CDNA ID no. 40041554
  misc_feature: Homolog of GI Number: 58531975 NR Desc: OSJNBb0003B01.8
MAAAARAIICELAPQKVSSTASGPAAPKKRDAGTKVVLQPRLCTLRSYGAGSGVVTRRILAGEEDGSGGADSGGSAALPFFASLADYIESSRKSQDFETISGRLAMVAFAAAVAVETTTGSSLFKKLDTMEIEEAAGVCVAVVASAAAFAWASSARNRIGQMFTLGCNAFVDSLIDNIVEALFSEGELQDWSDDI

SEQ ID NO: 10769 - DNA, 1656 bp, Zea mays
  misc_feature: Ceres CLONE ID no. 1675630
  misc_feature: Ceres CDNA ID no. 35391796
  CDS (41)..(1528): REFERENCED BY SEQ ID NO: 10770
aagggcttctgtgcagcacccaagcaggaattcagaaagaatgcctggaagcatccacatctcagccactcaaccaccagtcatcacccctctgttcttgcaagtcactgtgggcaacagagaatacagtggaaacatagaacaagatgctttatctttccccgttacatcacttcgggagagtatggtaataatgctgtacagtgcagacggggcattgatatcaaaatcagagctgaagacaaaagagattgtggagtcaggaactatggacacagtatttgctcttgatagcgggggagaaatagttcttcagattcagttcttgctcaacgatgatgaccgcaagcgaatccaagaaatgagaaattctgtgatgaagatgaagcagcaagagctgcttggggatgacaatgaactcaatttttcagacagcgcattgtctaaacggctgacggagaagatttccaacatccgaagcaaagcagctgaacgatctgagcttcagaagagcatgtcactggatgatttgcaagagcgggccgtgttccctggaatcgatgcggatccacgggtgaaggcctcaagggactcgttgctgcaagggggtgtaaggttggaagatcccggtggctccaagcagcggctgagccaggccgaagtcgaagccttggcatcgccggtggaaggggaggggcggcgcctaggcctggacgtagcatccggcggcgggcgaggggtcgtgggagaggcggagcaggacgtcagcgacggggcaggggcattggatgcgatcagcacgtggccgccggacaggccgggccctggctccaagaaaggggacagcataccagagagcagcaaatcaagtagtgcagtgaagacgatgataagtagctttgaaggcaccaccaccccacagggtatcgtttcagaaaccgactcaggcagccgcagcacgcaggcaggcaaaacagccatcatccctgttgatgatcaccacaaagcttcaaatcacaggtctcagcatatactagtagaaacgatcgcacctgcacaactacaaactattaggacgccaaaagcagccgaaagcagaagccgacgcagagcaagcaagcagcacaacgagctgcatccaagaactaggaggaggtcacaggcaaagcagatgcagatgcagccaagagactacgtggagcgtcccttgaactatctggttgcgacgtcgagcacctggatacacccgcacatctgcgtcacgggcgcgaccaagcaactgaaagacctccttgagcttgagcacctcaacttccaacgcaccgctactaagggacagcaagagaaaaagcgacgaacccattgccgccgccgccgctgctcgggctcgcagcggtggtttcctgatgataaacgggtggctgatagttcagggggtgcgtgctgcagttgtgctcacggtttgctgcggggccatgttcttcagcagcagcagcagatgaagaaatctagcagtgcctacccttaatttttgcatacacaagccacagccacagtaatgtaattgtcaagttttactgaaaaaaaaaaaaaaaaaaaaaaaaaaaaaaaaaaaaaaaaaaaaaaaaaaaaaaaacaagaaaaaaaaaaaaaaaa

SEQ ID NO: 10770 - protein, 447 aa, Zea mays
  misc_feature: Ceres CLONE ID no. 1675630
  misc_feature: Ceres CDNA ID no. 35391796
MVIMLYSADGALISKSELKTKEIVESGTMDTVFALDSGGEIVLQIQFLLNDDDRKRIQEMRNSVMKMKQQELLGDDNELNFSDSALSKRLTEKISNIRSKAAERSELQKSMSLDDLQERAVFPGIDADPRVKASRDSLLQGGVRLEDPGGSKQRLSQAEVEALASPVEGEGRRLGLDVASGGGRGVVGEAEQDVSDGAGALDAISTWPPDRPGPGSKKGDSIPESSKSSSAVKTMISSFEGTTTPQGIVSETDSGSRSTQAGKTAIIPVDDHHKASNHRSQHILVETIAPAQLQTIRTPKAAESRSRRRASKQHNELHPRTRRRSQAKQMQMQPRDYVERPLNYLVATSSTWIHPHICVTGATKQLKDLLELEHLNFQRTATKGQQEKKRRTHCRRRRCSGSQRWFPDDKRVADSSGGACCSCAHGLLRGHVLQQQQQMKKSSSAYP

SEQ ID NO: 10771 - DNA, 903 bp, Zea mays
  misc_feature: Ceres CLONE ID no. 1675647
  misc_feature: Ceres CDNA ID no. 40041555
  CDS (265)..(549): REFERENCED BY SEQ ID NO: 10772
aaggctctcatatctagcattctagcaccagcagctaccaggagtagtggtttctcttgcgtccgcctcagggcttgcgtccccccgatctgtgtcgcggaggcggcgagcggcttggccggccgggagagagtgagatcgagctgcgagggcgacactcggacggaggtcggtcgagaagaggccaacgatcgacgagaggagaaggagatcactcagccgcctgcaagaaattcagcagcaggagaggatcgatcgaggaagatgtgcatggacggcgccgtgccggtgaagagggtctggctcggcatcgccgcgcgcctcggcctccgccgaaagaccggcctgaggaagctgaggaaggaggtgcgcacgtgcgagtaccgcgacgtgcacgtcatgtgggagatgctgcgggcgacggacgggccggcggtgccgctggcggagaaggaggccgcggcggcggcggccgtcgcggccgccgcaggcgccaggaagaggaggaacgcgtggaggcggttcgtctactactgctgcgcgttctgagcgacgcgcgtcgatcgatcgatcagcctggctgatgaacccaacggccggcgtcctagctttgtgctggtgatcgtcctaggctagctagctcctcaaagatccaaggtcgcgagctttgtgaacccgtgaccaaaatctcgaacgtgatcgggccatcgggggcgtcatcaggggaacgtgagctcgttcgagactcgagactatcatcgtctcgtcccccggcgaagatcgagagtatgagtacataggaagagtttggagtgggtgcggagagaaagggatgatcgagatgtacaaaaaataacttcgaaccaaagaagacttttgctttgataaaaaaaaaaaaaaaaa

SEQ ID NO: 10772 - protein, 94 aa, Zea mays
  misc_feature: Ceres CLONE ID no. 1675647
  misc_feature: Ceres CDNA ID no. 40041555
MCMDGAVPVKRVWLGIAARLGLRRKTGLRKLRKEVRTCEYRDVHVMWEMLRATDGPAVPLAEKEAAAAAAVAAAAGARKRRNAWRRFVYYCCAF

SEQ ID NO: 10773 - DNA, 1682 bp, Zea mays
  misc_feature: Ceres CLONE ID no. 1675791
  misc_feature: Ceres CDNA ID no. 35383530
  CDS (1)..(1485): REFERENCED BY SEQ ID NO: 10774
acggcgaagccggcggctggtatggatcccaatggcctcaaaactggaggccttttgctcccgaccatcgagaggcggtgcacgtcgcctccatccgtcattgtcatcggcggtggcatctcgggcgttgcagctgcccgtgccctctccaattcttcatttaaggtgactgttttggaatcgagagatcgtattggcgggcgcattcatactgataactcgtttggatgcccaattgatatgggagcctcatggctacacggcgtgtgcaatgagaatccactggcaccattgataagctatcttgggctgaggttataccgcacaagcgatgataactcagttctgtatgatcatgatttagaaagctatgctctctttgataaggatggtaatcaggtcccaaaggagacagtcgataaagttggagaaacattcgagagaattcttgaagagacggtgaaagtgcgcgatgagcaggaacacgacatgccactgctacaggcaatttctattgtgtttgagaggcacccccatctaaagcttgaagggctagatgatcaggtcttacaatggtgtgtctgccggcttgaggcatggtttgctgcagatgcagatgaaatatctctgaagaactgggatcaggagcgtgttcttactggtggacatggactgatggtaaatgggtactatcctgttattgaagctcttgctcaaggtcttgacatcaggcttaaccaaagggtcaccgaaattacccgccagcacaatggagtcaaggtcactactgaagatggcacaagctacttggccgacgcctgcataatctcagtgccactcggcgtgctcaaggcgaacgtaataaagttcgagcctgagctgccccagtggaagagctccgccatcgccgacctcggcgtgggcaccgagaacaagatcgccatgcacttcgacagggtcttttggcccaacgtcgaggtgctgggaatggtcgggccgacgcccaaagcctgtgggtacttcctgaacctgcacaaagccaccggcaatccggtcctcgtgtacatggccgccggaaggttcgcccaggaggtggagaagctgtcggacaaggaagccgtcggcctggtcgtttctcacctgaagaagatgctcccggatgccactgaaccgacgcagtacctggtgtcgcgatggggctccgaccccaactccctggggtcctactcgtgcgacctggtcgcgaagccggccgacgtgtgcgcgaggttcgccgcccccgtcgagaacctgcacttcgccggcgaggcggccagtgccgagcactcggggtccgtgcacggcgcctactcgtcgggcatcgccgctgccgaggaatgcaggaagcggctcctggcgctgaagggcatcccggacctggtccaggtcgcggcgtgggaggagatggccggagctgtggctcctctgcagatttgcaggacctgagtgagattggatcactggctgcctttggacattggagtggatcgtggatcgcttcgctgctccctgatggttgccgagtcttttttttatatttaccttgaaggccgttgtgtcttgtctggaataaatcaagattgactggcactgaaagtgtcatcgcgtcactctttcatacttattaaaaaaaaaaaaaaaaa

SEQ ID NO: 10774 - protein, 487 aa, Zea mays; identical to SEQ ID NO: 9546
  misc_feature: Ceres CLONE ID no. 1675791
  misc_feature: Ceres CDNA ID no. 35383530
  misc_feature (228)..(269): Pfam Name: DAO PFAM Desc: FAD dependent oxidoreductase
  misc_feature (25)..(69): Pfam Name: FAD_binding_2 PFAM Desc: FAD binding domain
  misc_feature: Homolog of GI Number: 18650598 NR Desc: At2g43020/MFL8.12
  misc_feature: Homolog of GI Number: 50929549 NR Desc: OSJNBa0043A12.39
  misc_feature: Homolog of GI Number: 50929551 NR Desc: OSJNBb0004A17.1
  misc_feature: Homolog of GI Number: 70663937 NR Desc: OSJNBb0004A17.1
  misc_feature: Homolog of GI Number: 25404949 NR Desc: protein F1E22.18
  misc_feature: Homolog of GI Number: 29468124 NR Desc: putative amine oxidase 1
  misc_feature: Homolog of GI Number: 21553762 NR Desc: putative amine oxidase
  misc_feature: Homolog of GI Number: 9368354 NR Desc: putative corticosteroid binding protein
  misc_feature: Homolog of GI Number: 22213173 NR Desc: putative polyamine oxidase
  misc_feature: Homolog of GI Number: 37536384 NR Desc: putative polyamine oxidase

SEQ ID NO: 10775 - DNA, 1352 bp, Zea mays
  misc_feature: Ceres CLONE ID no. 1676179
  misc_feature: Ceres CDNA ID no. 40041556
  CDS (115)..(1191): REFERENCED BY SEQ ID NO: 10776
aaaccactgcaatccaaccacatagattttagcaggtgtgcaatccacaaggagctcgtcacagaacacagtctagaacaccaccgtgcaaacgacagcctgtaggaaaccgtcatggctgccggcggtgccgaccaaagggggaataatgctgcgacgacgacttttgtggtgccagcggtggcgctgagcttggggaagccgatgccgcgggtgggcttcggcacggcaacggcgacgctgggccaagcggagggccgcgccggcgtgacggaggcgatcctccgcgccctggacgctgggtaccgccactttgacaccgccgcagtctacaacacggaggcctcgctcggggacgcggtcgttgaggccgtgcgcgccgggactgtcgcctcccgtgacgatctctacgtcacgtccaagctctggatcaccgacgcgcaccccggccgcgtcctaccggctctccacaggacactgcagaatctgcagatgtcgtacgtggacctgttcctgattcaccacccggtgagcatgcgggcgccggccgacgacgaggctgaaggagcaggccccgcggtggtggtgaagaaagacctggtggccatggacatggagggcgtgtgggaggagatggaggagtgccacaggcgagggctggccagggccatcggcgtcagcaacttcagctgcaagaagctagagcacctgctctccgtcgccaagatccctccggctgtcaaccaggtggaggtgaacccgtactgccggcaggagaaggtcaggaatttctgcagggccaatggtatccagctctgcggctactctgcgatgggtgcgagcggcacagcgtgggccaacaactccgtcatggactcccctgtcctcaaacaaatcgcccacgctcgcggcaaaaccgtcgcccaggtgtgcattaggtgggtttacgagcagggtgactgcgtgatcgtcaagagctttaaccagagcaggatgcgagagaacctccacatcttcgactgggagctcaccgacgatgaccaccgcaagattagcgagctccctgagtccaggggcaactacgatttcttgatccatgaatctgggccgtacaaaacagcacaagagttatgggacggtgagatcacagccggccaatctaaccaaacgccgctcgtctccgacgactgatcatacagctttgtgatctcctttgtcacgaagaaggcctggagtatctctctttgtcaagattcaaatggttagaataaaatatttgtgaaaaaaaaaaaaaaaaaaaaaaaaaaaaaaaaaaaaaaaaaaaaaaaaaaaaaaaaaaaaaaaaaaaaaaa

SEQ ID NO: 10776 - protein, 358 aa, Zea mays
  misc_feature: Ceres CLONE ID no. 1676179
  misc_feature: Ceres CDNA ID no. 40041556
  misc_feature (25)..(318): Pfam Name: Aldo_ket_red PFAM Desc: Aldo/keto reductase family
  misc_feature: Homolog of GI Number: 31429870 NR Desc: putative NADPH
  misc_feature: Homolog of GI Number: 78707646 NR Desc: oxidoreductase
  misc_feature: Homolog of GI Number: 50920555 NR Desc: Putative NADPH
  misc_feature: Homolog of GI Number: 31429855 NR Desc: putative NADPH
  misc_feature: Homolog of GI Number: 31429856 NR Desc: putative NADPH
  misc_feature: Homolog of GI Number: 40781603 NR Desc: reductase 1
  misc_feature: Homolog of GI Number: 6478216 NR Desc: putative NADPH
  misc_feature: Homolog of GI Number: 6478210 NR Desc: NADPH
  misc_feature: Homolog of GI Number: 40781601 NR Desc: reductase 2
  misc_feature: Homolog of GI Number: 6478206 NR Desc: NADPH
  misc_feature: Useful for making plants with increased biomass and foliage
  misc_feature: Utility: ABA Useful for making plants with enhanced tolerance to drought
  misc_feature: Utility: Mannitol Useful for making plants with enhanced tolerance to drought
  misc_feature: Utility: PEG Useful for making plants with increased tolerance to drought
MAAGGADQRGNNAATTTFVVPAVALSLGKPMPRVGFGTATATLGQAEGRAGVTEAILRALDAGYRHFDTAAVYNTEASLGDAVVEAVRAGTVASRDDLYVTSKLWITDAHPGRVLPALHRTLQNLQMSYVDLFLIHHPVSMRAPADDEAEGAGPAVVVKKDLVAMDMEGVWEEMEECHRRGLARAIGVSNFSCKKLEHLLSVAKIPPAVNQVEVNPYCRQEKVRNFCRANGIQLCGYSAMGASGTAWANNSVMDSPVLKQIAHARGKTVAQVCIRWVYEQGDCVIVKSFNQSRMRENLHIFDWELTDDDHRKISELPESRGNYDFLIHESGPYKTAQELWDGEITAGQSNQTPLVSDD

SEQ ID NO: 10777 - DNA, 1118 bp, Zea mays
  misc_feature: Ceres CLONE ID no. 1676286
  misc_feature: Ceres CDNA ID no. 40041557
  CDS (46)..(780): REFERENCED BY SEQ ID NO: 10778
acccccacaccacactcgagagccatctcccagcacacgagcgcgatggcttccaccaccaccaccaccttcctcgccatcttgctagtcgtggcagcttcggcggcgccggcacggtcctgctcaccgcgcgacatccacgcgctgctgagcgtgaagcaggcgctgggcaacccggcgtcgctgtcgacgtggacgccggcgtcgcccaactgctgcgcgtgggacctgtccagcaaccggctgacgggcggcatcccggcggcgttcgccgacctgcccagcctccggtcgctggacctccggcacaaccagctgacgggccccatcccggcggggctggtgcaggggcagttccggtcgctggtcctgtcctacaaccagctcacgggccccatcccgcgcgacgacgcgcgcgacgagatcaacaccgtcgacctctcccacaacaggctcaccggcgacccctcccacctgttcgccgccggccggcccatcggcaaggtggacctgtcgtggaactacctcaacttcgacctcagcaggctggtgttcccgccggagctcacgtacctggacctgtcccacaacctcatccgcggcaccgtgccgctgtcgctggagcgcctgtccacgctgcagaagctggacctcagctacaaccgcctgtgcggcccgctccccaagggccacggcgtcatcaagcacgggtgcaagccgtacgcgcacaaccagtgcagcaaagggaccccgctcgcgggatgccaggacctggagtgagtgagccggtggccatggttttctatactctgctctgctctccctcgccggcgttcttttcgtgtcccaatcttgaaggacgacggtacggtgcctggtttagctatagacaaaaaaaggtacggccgcgtggtggcggtgctaatatgcttagccacgcccacgcgcggttgatctttgagcagttaagcgtgtacgaaatgacagctgtgtacgtgtactgtctggtggagtgtgctgtgtatctggtctcgatccgatcggcctaatgtatgaaaaaaaaaggatgtttacgtactaaatggaaaatcattttttcccaaaaaaaaaaaaaaaaa

SEQ ID NO: 10778 - protein, 244 aa, Zea mays
  misc_feature: Ceres CLONE ID no. 1676286
  misc_feature: Ceres CDNA ID no. 40041557
  misc_feature (80)..(100): Pfam Name: LRR_1 PFAM Desc: Leucine Rich Repeat
  misc_feature: Homolog of GI Number: 68565905 NR Desc: Polygalacturonase inhibitor 1 precursor
  misc_feature: Homolog of GI Number: 52353597 NR Desc: putative polygalacturonase inhibitor
  misc_feature: Homolog of GI Number: 18148376 NR Desc: polygalacturonase
  misc_feature: Homolog of GI Number: 18148923 NR Desc: polygalacturonase
  misc_feature: Homolog of GI Number: 18148925 NR Desc: polygalacturonase
  misc_feature: Homolog of GI Number: 62131093 NR Desc: polygalacturonase inhibiting protein
  misc_feature: Homolog of GI Number: 30984105 NR Desc: polygalacturonase
  misc_feature: Homolog of GI Number: 1143381 NR Desc: polygalacturonase inhibitor
  misc_feature: Homolog of GI Number: 3337095 NR Desc: polygalacturonase inhibitor
  misc_feature: Homolog of GI Number: 1679733 NR Desc: polygalacturonase
  misc_feature: Useful for sterility
MASTTTTTFLAILLVVAASAAPARSCSPRDIHALLSVKQALGNPASLSTWTPASPNCCAWDLSSNRLTGGIPAAFADLPSLRSLDLRHNQLTGPIPAGLVQGQFRSLVLSYNQLTGPIPRDDARDEINTVDLSHNRLTGDPSHLFAAGRPIGKVDLSWNYLNFDLSRLVFPPELTYLDLSHNLIRGTVPLSLERLSTLQKLDLSYNRLCGPLPKGHGVIKHGCKPYAHNQCSKGTPLAGCQDLE

SEQ ID NO: 10779 - DNA, 929 bp, Zea mays
  misc_feature: Ceres CLONE ID no. 1676484
  misc_feature: Ceres CDNA ID no. 36703575
  CDS (197)..(772): REFERENCED BY SEQ ID NO: 10780
agcacaacacctcgctttttgtactcttccgtctttgccctcgcgttatcgcgctcgtctcgcctggcctagctagctgcctgcctgccttggcttgcttgctacgtcgtgtacacagcgagaggaaggacaggagcaagaaaagaaagaagagagagagagagagagagtcgtttcctttcctcgaacttattccatggagacctcttctcacaagcgggcgcgggaggcggtcgatctcgccgccgccgccgccgccgccggagaggccgtgtggccggagtccgacgcaaagaggctgcggccgcaggacctgctcgacatgctcgaggacgacaccgacgcggcggccgccggcgacctggcgtccgtcatgcggagcctggaggaggagatagccagcttcgacgaggccgcggaggcggcgccgtcgcagcagccggagctggggttcctgctcgaggcctcggacgacgagctgggcctgccgccggccggatccgccgccgcctcttcggaggaggccgggctcgccggcccgccggagcccgccgcccccgccgccgccgcgctctacggccagatctgggccttcgacgacgagatcgacggaggcttcggtggctactcgcccgaggctgccgccgccgccgccgccgccgccgcgtgggacgacgacgtcttcggcgccggcctgttcgcgttcggcgacgacgcgtgcgggccctcggatctcgcggcgctgcgccacgagaccatgcccgccgtctgatgacgcgtccccccgtgcgtgcggccgcagacaggggattagcccctatcttttttctcgtttttatgtttacctttggctaacctgaatgtaaagtttcttaggagggttaaaacagagccgtgcaaacttggtaagataaaaaaaaaaaaaaaaa

SEQ ID NO: 10780 - protein, 191 aa, Zea mays
  misc_feature: Ceres CLONE ID no. 1676484
  misc_feature: Ceres CDNA ID no. 36703575
  misc_feature: Homolog of GI Number: 66778264 NR Desc: LigA
  misc_feature: Homolog of GI Number: 66776365 NR Desc: PE
  misc_feature: Homolog of GI Number: 67640326 NR Desc: COG3321: Polyketide synthase modules and related proteins
  misc_feature: Homolog of GI Number: 66776633 NR Desc: Response regulator receiver
  misc_feature: Homolog of GI Number: 66776103 NR Desc: LigA
  misc_feature: Homolog of GI Number: 66778899 NR Desc: UvrD/REP helicase
  misc_feature: Homolog of GI Number: 76817519 NR Desc: Carbamoyl
  misc_feature: Homolog of GI Number: 71368905 NR Desc: similar to ATPase involved in DNA repair
  misc_feature: Homolog of GI Number: 66779654 NR Desc: Acyl
  misc_feature: Homolog of GI Number: 66780099 NR Desc: PE
METSSHKRAREAVDLAAAAAAAGEAVWPESDAKRLRPQDLLDMLEDDTDAAAAGDLASVMRSLEEEIASFDEAAEAAPSQQPELGFLLEASDDELGLPPAGSAAASSEEAGLAGPPEPAAPAAAALYGQIWAFDDEIDGGFGGYSPEAAAAAAAAAAWDDDVFGAGLFAFGDDACGPSDLAALRHETMPAV

SEQ ID NO: 10781 - DNA, 1696 bp, Zea mays
  misc_feature: Ceres CLONE ID no. 1676670
  misc_feature: Ceres CDNA ID no. 36706993
  CDS (70)..(1245): REFERENCED BY SEQ ID NO: 10782
aaagcacgtgcgcaatcagccatggtaaaaaaaacagtttaattaacttgatgatgtacctagctgggaatggcgagcgcgctggagacgctgtgcgggcaggcgttcggcgccaagaagcaccacatgctgggggtgtacctgcagcgctcctggatcgtgctcctcatcttcgccgccgcgctgacgccgacgtacatcttcatggaggacctgctgctgctgatcgggcagtccccggagctgtcgcggttggcggggcagatgagcgtgtggctgctcccgcagcacttcgccatggcgatgctgctcccgctcacgcggttcctgcagagccagctgaagaactgggtgaccgcgatcaccgcggccgtcgcgctcgccatccacgtcgtcgccacctacgtgctagtgcgtctcctcgacttcggcatcgtcggggccgtcgcctctgcggacatggcgtggtggttggtcgtgctgggccagtacgtctacgtcgtcggcggctggtgcccgctgtcgtggaaggggttcaccatggaggcgttcgccgacttctgggagttcatcaagctctcctcggcctccggagtgatgctctgcttggagaactggtactaccgagtgttggtgttgctgacagggtacctggacaacgctgaaatcgctgtggatgcactctccatatgtcagacgatcaacggatgggagatgatgatcccgttcggcttcttagcagcaaccggggtgcgagtcgcaaatgagctcggcgcagggagcggcaaaggtgcgcgcttcgccatcgtggtgtccatcacgacgtccgtggtgatcggcctcgtcttctggtgcctcatcctctacttcgacgacaagatcgcgcttctcttcacgtccagcgcggtcgtgctcgacgccgtgcaccacctgtccgtgctgctcgcattcaccatcctgctcaacagtgtgcagcccgtcctctcaggggtggccgttggttcaggatggcaagcactggtcgcctacgtcaacgtcggcagctactacctcatcggagttcccttgggtatcgtactcggttggccgctgcacttcggagtagggggaatctggtccgggatgattggagggaccgccgttcaaacgctcatactggcatacctcactgccaaatgtgattggcacgaagaggcgaagttagctagtatgagaatgaagaagtgggccgacgagtcgaaataaacccactgcactgctgcgctttgtttgttagccaggcacacaggggaacccctgaagctaaggtaacttctgatacagcgctatgcatattccggccttcagacgccgttccctgcagcttgctgcggcagtttgctacaggaaaatgaagccgcaggtttctgacgatggtgtacggaaacctcccatagtggaattgcgtaccgcgcgtgtcaaaatattgttccactatagctaatatgggacaggacattcatcgtttttttttcttctcatcatcgttgttgtttgggcgcgtttggtttgcttccgaggcgcccaggcatgcctggctctcattaggtcaacaaggctacacttgtcctaattgagtacatacaacacaaaatatttggttgttgtaaggataattttaaagtacagtttcggtgccaaaaaaaaaaaaaaaaaa

SEQ ID NO: 10782 - protein, 391 aa, Zea mays
  misc_feature: Ceres CLONE ID no. 1676670
  misc_feature: Ceres CDNA ID no. 36706993
  misc_feature (173)..(336): Pfam Name: MatE PFAM Desc: MatE
  misc_feature: Homolog of GI Number: 50900316 NR Desc: putative ripening regulated protein DDTFR18
  misc_feature: Homolog of GI Number: 50946905 NR Desc: putative ripening regulated protein
  misc_feature: Homolog of GI Number: 72384467 NR Desc: 52O08_38
  misc_feature: Homolog of GI Number: 34902422 NR Desc: Putative ripening regulated protein
  misc_feature: Homolog of GI Number: 12231296 NR Desc: ripening regulated protein DDTFR18
  misc_feature: Homolog of GI Number: 77553552 NR Desc: MATE efflux family protein
  misc_feature: Homolog of GI Number: 77548508 NR Desc: MATE efflux family protein
  misc_feature: Homolog of GI Number: 77548498 NR Desc: MATE efflux family protein
  misc_feature: Homolog of GI Number: 72384425 NR Desc: 4D11_27
  misc_feature: Homolog of GI Number: 50948549 NR Desc: putative ripening regulated protein DDTFR18
MASALETLCGQAFGAKKHHMLGVYLQRSWIVLLIFAAALTPTYIFMEDLLLLIGQSPELSRLAGQMSVWLLPQHFAMAMLLPLTRFLQSQLKNWVTAITAAVALAIHVVATYVLVRLLDFGIVGAVASADMAWWLVVLGQYVYVVGGWCPLSWKGFTMEAFADFWEFIKLSSASGVMLCLENWYYRVLVLLTGYLDNAEIAVDALSICQTINGWEMMIPFGFLAATGVRVANELGAGSGKGARFAIVVSITTSVVIGLVFWCLILYFDDKIALLFTSSAVVLDAVHHLSVLLAFTILLNSVQPVLSGVAVGSGWQALVAYVNVGSYYLIGVPLGIVLGWPLHFGVGGIWSGMIGGTAVQTLILAYLTAKCDWHEEAKLASMRMKKWADESK

SEQ ID NO: 10783 - DNA, 1541 bp, Zea mays
  misc_feature: Ceres CLONE ID no. 1677076
  misc_feature: Ceres CDNA ID no. 40041558
  CDS (120)..(1247): REFERENCED BY SEQ ID NO: 10784
actccgtctcagaacgccccagccttccacctcgaactccgcggcgcccagcgccctcggtaaccgccccccgccccgccacagagacaggtcgacgagacagacaaaggccggccgccatgggagaggacaagaaggcgggcaacaaggacgccgccggcggcgacaagaagaaggacgccggcgccggggccgcgccgcagcccatcgtgctgaaggtcgacttgcactgcgccggctgcgccaacaaggtccgcaaggccatcaagcacgccccaggtgtggagtcggtgacgccggacatggcggcgggtaaggtggtcgtgaccggtccggcggacgcggtggagctcaaggagcgcatcgaggccagggcgaagaagcccgtgcagatcgtctccgccggcgccggcccacccaagaaggagaaggacaaggagaaggagaaggataagaaagcggacggcggcgagaagaaggcggacaaagagaagggcggcggcggcggcggagagaagaaggccgacaaggaaaagggcggcggagagaagaaggccgacaaggagaagggcggcggcgagaagaaggccgacaaggagaagggtgccgacaagcccaaggaggagaagaagaagcccaaggaggagactgtgacgctgaagatccggctgcactgtgacggctgcatcgagcgcatcaagcgccgcatctccaagatcaaaggcgtgaaggacgtggcgttcgacgccgccaaggacctggtgaaggtgaccggcaccatggacggcgccgctctgccggcgtacctcagggagaagctcagccgggacgtggaagtggtggcgcccggcaagaaggacggcggcggcggcggtgacaagaaggacaagggcgcaggagacgggggagataagaagaaggacggtggcggcggcggcggcggcggggccgaggagaagaaggacaaggccggggccgcggccgcctccgcgtcggtggcgccgccgcccctggccgacgccggcatgtaccaggtgccgccgcactacgggtacgcgccgtaccaccagccggctccaggcggctactacggtgccgccccaccgcccaaccaccacgccggcttctaccccaacggcggcggcgtccattacccgcccgcgccagcctacgcgtacggccccacccacctccacgcgccccagatgttcagcgacgagaaccccaacgcctgctccgtcatgtgaactcgctcgcttcgccggtttgccgccgccgccgcgccttggcacccccttcctccgtgtgagaccaagaaccatgggcttgtcctggattagcggtgtctttagttaaaattatcagtgagtagtagctagcttaagcagtgctccgatccgagatcagttcttccagcagacctgtgtaaatgagagtctcgccgccccgccccgccccgccccggtgtaacgcatcgtcatgtgtaaaatctatccggacccgataaagttttgcccttctgtcaaaaaaaaaaaaaaaaa

SEQ ID NO: 10784 - protein, 375 aa, Zea mays
  misc_feature: Ceres CLONE ID no. 1677076
  misc_feature: Ceres CDNA ID no. 40041558
  misc_feature (178)..(242): Pfam Name: HMA PFAM Desc: Heavy
  misc_feature: Homolog of GI Number: 31432315 NR Desc: putative metal
  misc_feature: Homolog of GI Number: 50915918 NR Desc: heavy
  misc_feature: Homolog of GI Number: 4097571 NR Desc: GMFP5
  misc_feature: Homolog of GI Number: 20197942 NR Desc: putative farnesylated protein
  misc_feature: Homolog of GI Number: 50923867 NR Desc: OSJNBa0053B21.14
  misc_feature: Homolog of GI Number: 21591780 NR Desc: cadmium induced protein CdI19
  misc_feature: Homolog of GI Number: 79326820 NR Desc: metal ion binding
  misc_feature: Homolog of GI Number: 77554836 NR Desc: Heavy
  misc_feature: Homolog of GI Number: 66780099 NR Desc: PE
MGEDKKAGNKDAAGGDKKKDAGAGAAPQPIVLKVDLHCAGCANKVRKAIKHAPGVESVTPDMAAGKVVVTGPADAVELKERIEARAKKPVQIVSAGAGPPKKEKDKEKEKDKKADGGEKKADKEKGGGGGGEKKADKEKGGGEKKADKEKGGGEKKADKEKGADKPKEEKKKPKEETVTLKIRLHCDGCIERIKRRISKIKGVKDVAFDAAKDLVKVTGTMDGAALPAYLREKLSRDVEVVAPGKKDGGGGGDKKDKGAGDGGDKKKDGGGGGGGGAEEKKDKAGAAAASASVAPPPLADAGMYQVPPHYGYAPYHQPAPGGYYGAAPPPNHHAGFYPNGGGVHYPPAPAYAYGPTHLHAPQMFSDENPNACSVM

SEQ ID NO: 10785 - DNA, 1622 bp, Zea mays
  misc_feature: Ceres CLONE ID no. 1677872
  misc_feature: Ceres CDNA ID no. 35383531
  CDS (91)..(1350): REFERENCED BY SEQ ID NO: 10786
aatagcggcgaccggcgacgagcggaagccttcctccatcttcaggctgctagtactcagtagtcagtacagtacagtggtgccgacgacatgacgaagatctcccgctcgttgctcgtcgtcatcgcgctggtcctcctcggccctcacctcccgccatccgaggcgctgacgcccaagcagggcgtcaggtccaagaccttcctgtccccgcccatcctgcttcgcccgggcgacgtggccgacaagttctactacgacatccccttcccccggggccacctggcgctcaagagcttcaacggcgaggtggtggacgagcgcggcgcccccgtgccgctccacgagacgtacctccaccactgggtcgtgcagccctactacgccctggtagtatcggcggagggcggcagcagccggccgcggaccatcccggcgcgcaacgccggcgtgtgcagcggccacacgctgggccagtactacgggctggggtccgagacccggcgcacggccacgtgggtgcccgacccgtacggcatcgagatcggcgacccggccgcggcgcccgccagcgagggctacgagcagcgctggctgctcaacgtgcacgccatcgacacgcgcggcgccgccgaccggacgatggcgtgcaccgagtgccgctgcgacgtgtacaacgtgacggcggactggcgcgggcacgccatcgagcccgggtacgccggcggcctgcgctgctgctacgacggcacgcggtgcggcgccgcggcggagggggctgaggggaaggccaggactgtgttcctgcgctacacggtgatgtggcgcgactggagccccgcggcggtgctgcccgtgcggatctacatcttcgacgtggccggctgcggcgtggagtacgacgtggaggagcagtgcagcggcggcgcgggcggggagtgcgtgcacgtgaagacggccacgcaggcgctgccgcggggcggcgacgtggtgttcggcgtggcgcaccagcacgcgggcggcgccggcgcgtcgctgcacggcgccgacggccgcctgctgtgcgagtcggcggccacgtacgggggcgggcgggaggccggggacgaggcgggatacatcgtcggcatgtccacgtgctacccgcgcccgggcgccgtcacggtgcgcgacggcgagccgctcaccgtcgtgtccaggtacagcagcgaccggcgccacacgggcgtcatgggcctcttctacatcctcgtggccgaccacgcccggcagctgccgccgcaggagggcctgtgcttcagcttcccggtcccatggtgcctaccgtcatggctgtcgagcaacctgtgagatcttttggtgttgaaagctggtgctatgttctaattagctgcttggttagggttcggttcggggctggtgatggtagggcaaagcaaggaaggccgcgtgggtccttgcgttactcatacaatagtagtaatgtaaaaatatagaagcagcggtcagtctactctgctgttgctgtattatacaataaccacgtcgctcccaaaaaaaaaaaaaaaaaaaaaaaaaaaaaaaaaaaaaaaaaaaaaaaaaaagaaaaaaaaaaaaaaaaa

SEQ ID NO: 10786 - protein, 419 aa, Zea mays
  misc_feature: Ceres CLONE ID no. 1677872
  misc_feature: Ceres CDNA ID no. 35383531
  misc_feature (266)..(400): Pfam Name: SURNod19 PFAM Desc: Stress up
  misc_feature: Homolog of GI Number: 50948047 NR Desc: putative MtN19
  misc_feature: Homolog of GI Number: 10176875 NR Desc: MtN19
  misc_feature: Homolog of GI Number: 2598589 NR Desc: MtN19
  misc_feature: Homolog of GI Number: 52550577 NR Desc: MtN19
  misc_feature: Homolog of GI Number: 2078483 NR Desc: antifreeze glycopeptide AFGP polyprotein precursor
  misc_feature: Homolog of GI Number: 66776103 NR Desc: LigA
  misc_feature: Homolog of GI Number: 66776365 NR Desc: PE
  misc_feature: Homolog of GI Number: 66779191 NR Desc: LigA
  misc_feature: Homolog of GI Number: 66778899 NR Desc: UvrD/REP helicase
  misc_feature: Homolog of GI Number: 66779656 NR Desc: Insulinase
MTKISRSLLVVIALVLLGPHLPPSEALTPKQGVRSKTFLSPPILLRPGDVADKFYYDIPFPRGHLALKSFNGEVVDERGAPVPLHETYLHHWVVQPYYALVVSAEGGSSRPRTIPARNAGVCSGHTLGQYYGLGSETRRTATWVPDPYGIEIGDPAAAPASEGYEQRWLLNVHAIDTRGAADRTMACTECRCDVYNVTADWRGHAIEPGYAGGLRCCYDGTRCGAAAEGAEGKARTVFLRYTVMWRDWSPAAVLPVRIYIFDVAGCGVEYDVEEQCSGGAGGECVHVKTATQALPRGGDVVFGVAHQHAGGAGASLHGADGRLLCESAATYGGGREAGDEAGYIVGMSTCYPRPGAVTVRDGEPLTVVSRYSSDRRHTGVMGLFYILVADHARQLPPQEGLCFSFPVPWCLPSWLSSNL

SEQ ID NO: 10787 - DNA, 605 bp, Zea mays
  misc_feature: Ceres CLONE ID no. 1677886
  misc_feature: Ceres CDNA ID no. 35383532
  CDS (3)..(557): REFERENCED BY SEQ ID NO: 10788
acggccagccgctcctgccattacacgtcccgagagcagcgcctgagcggagcccaggaggccaggacccatggccgtcaccgccgtcgcggcgtctatgtccgtggcgcaggggctcgggaagcccctctgcgccggcagcaacgcgacgtcgctccggggcgtcgcgctcgcgccccgtcgttcggcggcccggatggccgtcgtccgggcgtcgtccgcgcatcaggagcagcacccggccaaggagtgggcggccgcggcggccgtggcggcggcgctggtgctgccggaggtcgcggaggccgcgcccgggatctcgccgtcgctcaagaacttcctcctcagcatcgtctccggaggcgtcgtgctcgtcgccatcgtcggcgccgtcgtcgctgtctctaacttcgatcccgtcaagcggcgctgagctcaagcaactacacgtgcacacatgcatgcagcgttgtatgttgcatgctgtacgccgcctgtacctatgtactacttcccaatgtaaacagcgtttaatctgtgaatcttttgccgtgtaaatgcgatttgcgtgatctcacatacatgttcagcaaaaaaaaaaaaaa

SEQ ID NO: 10788 - protein, 120 aa, Zea mays; identical to SEQ ID NO: 10072
  misc_feature: Ceres CLONE ID no. 1677886
  misc_feature: Ceres CDNA ID no. 35383532
  misc_feature (83)..(120): Pfam Name: PsbX PFAM Desc: Photosystem II reaction centre X protein
  misc_feature: Homolog of GI Number: 50939905 NR Desc: putative ultraviolet
  misc_feature: Homolog of GI Number: 45356861 NR Desc: ultraviolet
  misc_feature: Homolog of GI Number: 33520421 NR Desc: ultraviolet
  misc_feature: Homolog of GI Number: 18476498 NR Desc: ultraviolet
  misc_feature: Homolog of GI Number: 67987580 NR Desc: ABC transporter

SEQ ID NO: 10789 - DNA, 629 bp, Zea mays
  misc_feature: Ceres CLONE ID no. 1678757
  misc_feature: Ceres CDNA ID no. 40352080
  CDS (2)..(250): REFERENCED BY SEQ ID NO: 10790
aagcttcccttccaagaagcgcagcgcccatgtccatggccacgcaagcctccgccgccacgcgccacctgctggccgccgcctgggcgccggcggcgaagccgtggcagctgagctcgcagctcgcgctgccgtcgtcgtcctcccgcgggccggcaactccctcacctccggccagaagggcctgctcatctacggcagcctcctcatcggcttcctcttcttcatctccggctacttcctgcaatgatgacgccaacaacgactctttctgatctgatctgctttccgtttgtgtgaatagaatacttcgtccgtgcatgtactcctccccactccgagggaacaacattcatcatcaatcgactagaaactcttggttttagatttttttttttatttgatgcggtgatcgttaagttcacaggaacaccaagcgcatatcccctccatggttgtaatatgtggacaacaaaactacaaactagacataaagcatgtcataggcacagtggtagaggagggtacgcgtggtgcacacatatcttatccaaccattgcctggcctcaaaaaaaaaaaaaaaaaaaaaaaaaaaaaaaaaaaaaaaaaaaagaaaaaaaaaaaaaaa

SEQ ID NO: 10790 - protein, 81 aa, Zea mays
  misc_feature: Ceres CLONE ID no. 1678757
  misc_feature: Ceres CDNA ID no. 40352080
MSMATQASAATRHLLAAAWAPAAKPWQLSSQLALPSSSSRGPATPSPPARRACSSTAASSSASSSSSPATSCNDDANNDSF

SEQ ID NO: 10791 - DNA, 642 bp, Zea mays
  misc_feature: Ceres CLONE ID no. 1678955
  misc_feature: Ceres CDNA ID no. 36706897
  CDS (94)..(480): REFERENCED BY SEQ ID NO: 10792
aaacgacctgcagccaaccatctaccagcgactcagcgagcgagagcagcacacactgcacgcagctagctaggagcagcagcagcggcggcgatggcggcctccatgatctcctcgtcagctctggcggtggcgcctcagggcctgccgcccctcggccgccgcgcctcctccttcgccgtcgtctgctccaagaagaagatcaagaccgacaagccctacgggattgggggtggcctgaccgtcgacgtcgacgccaacgggagaaagggcaagggcaagggcgtgtaccagttcgtcgacaagtacggcgcgaacgtcgacggatacagcccaatctacaacgaggatgactggtctcccaccggcgacgtctacgtcggtggaaccactgggcttctgatctgggccgtcaccctcgctgggatcctcggcggcggcgccctcctcgtctacaacaccagcgccctctccggctaaggatatccaatgcatgcgcttcttgcgattcgtcatgtaaaatcagggtgtctgtctataatctagcctccatggatgctcaaccttcgtcatgtaacaataatcagtgctactcttcattacataattttgatgctatatatataaaaaaaaaaaaaaaaa

SEQ ID NO: 10792 - protein, 124 aa, Zea mays; identical to SEQ ID NO: 9358
  misc_feature: Ceres CLONE ID no. 1678955
  misc_feature: Ceres CDNA ID no. 36706897
  misc_feature (29)..(124): Pfam Name: PsbR PFAM Desc: Photosystem II 10 kDa polypeptide PsbR
  misc_feature: Homolog of GI Number: 50942069 NR Desc: putative photosystem II 10K protein
  misc_feature: Homolog of GI Number: 1835731 NR Desc: photosystem II 10 kDa polypeptide
  misc_feature: Homolog of GI Number: 83776786 NR Desc: chloroplast photosystem II 10 kDa protein
  misc_feature: Homolog of GI Number: 22669 NR Desc: NtpII10
  misc_feature: Homolog of GI Number: 1217642 NR Desc: PSII polypeptide
  misc_feature: Homolog of GI Number: 21489 NR Desc: ST
  misc_feature: Homolog of GI Number: 25989650 NR Desc: photosystem II 10 kDa protein
  misc_feature: Homolog of GI Number: 81471 NR Desc: photosystem II 10K protein precursor
  misc_feature: Homolog of GI Number: 1418984 NR Desc: photosystem II 10 kD polypeptide
  misc_feature: Homolog of GI Number: 33694227 NR Desc: 10 kDa photosystem II polypeptide

SEQ ID NO: 10793 - DNA, 959 bp, Zea mays
  misc_feature: Ceres CLONE ID no. 1678990
  misc_feature: Ceres CDNA ID no. 40041559
  CDS (110)..(649): REFERENCED BY SEQ ID NO: 10794
aaagagccccccaaaaagatccagccgccgcgcgccgcggcccctgagcctgtgagggaacgcagaagagggtttccgtgccgcgccacacgaccccccccggcgggcgatggacaccgaccacggcggcgcgtcggccgcgggcatggacgaggcggaggcggccttcttcgcgcgcgggggccggcggtgctgctgcttcccctggcccgccgccgcctcctcctcctcctcccaccagcgggtcggcggcgccgcggcggcggcggcggcggcggcggaggagacctggtggcagcgcgcggtggacgcggtgctcaaggtgcgcgagtggtcggagctggtggccggcccgcggtggaagaccttcatccggcggttcggccgcagcggcccgcccgcgcggccgcaccaccaccacttcggcggccgcaagctcaactacgacgcgctcagctacgcgctcaacttcgacgagggccacggcgccagccccgagggcgactacaccggctaccgcgacttctccgcgcgcttcgtcggaccgcctgcctccgccaagtcgtccatggacctcggcggccgcgacgcgccgccgctcttcggcccgccgccgctgccgccccacgacggagccggccgcgcctgaccgccacatcggtcgtcggaccggagcaggggaaggaacgctgattgagtggtcaaaggaaaggtgtccaaagtatctcaggaaaaaaaatggtgaccggttcgggtggatttgaggattccgcgggcgtcccggtgagaatggtgagcgagatcgctgctacaattccttcctcccctagtctccttcgtccgttcggttgattgattggtttagccactgtaaaaatgagattgctactgctacattcattgtcatgttacctgctgctgtaatgaatccgttcaccctgtaaaaaaaaaaaaaaaaa

SEQ ID NO: 10794 - protein, 179 aa, Zea mays
  misc_feature: Ceres CLONE ID no. 1678990
  misc_feature: Ceres CDNA ID no. 40041559
  misc_feature: Homolog of GI Number: 50912661 NR Desc: NHL repeat
  misc_feature: Homolog of GI Number: 51535190 NR Desc: NHL repeat
  misc_feature: Homolog of GI Number: 30685100 NR Desc: NHL repeat
  misc_feature: Homolog of GI Number: 15241990 NR Desc: F
  misc_feature: Homolog of GI Number: 66778899 NR Desc: UvrD/REP helicase
  misc_feature: Homolog of GI Number: 66776664 NR Desc: Sigma
  misc_feature: Homolog of GI Number: 71367849 NR Desc: similar to Methylase involved in ubiquinone/menaquinone biosynthesis
  misc_feature: Homolog of GI Number: 33150824 NR Desc: Ser/Arg
  misc_feature: Homolog of GI Number: 55586489 NR Desc:  similar to Ser/Arg
  misc_feature: Homolog of GI Number: 23274133 NR Desc: Serine/arginine repetitive matrix 1
MDTDHGGASAAGMDEAEAAFFARGGRRCCCFPWPAAASSSSSHQRVGGAAAAAAAAAEETWWQRAVDAVLKVREWSELVAGPRWKTFIRRFGRSGPPARPHHHHFGGRKLNYDALSYALNFDEGHGASPEGDYTGYRDFSARFVGPPASAKSSMDLGGRDAPPLFGPPPLPPHDGAGRA

SEQ ID NO: 10795 - DNA, 640 bp, Zea mays
  misc_feature: Ceres CLONE ID no. 1679066
  misc_feature: Ceres CDNA ID no. 40352081
  CDS (84)..(395): REFERENCED BY SEQ ID NO: 10796
aacacagcaaccagtaagccatcgctcacacagtcagaccgacgcactcactaacacacaacttctccatacacgccttagccatggcttccgctgcgcagaagaagatgacaattgtttgcttgatgctgctggccgtcgtcggccaaatcgtcgctgatgatgatgttaccgtagaacatcccagccgcatctgcaccgaaacggtgattgatcctcgtgttcccaacaacgtgtgcatctgctccaagaactgcgcctgtgccggcaagtgtatccttgagtcggctgatgctgtccagacctgctttgtcgactgcgtcctcaagaacgactgcatctgcagcaacaagatcatccccggcgctgacgacccaaaggctaatgccaagtgaagtagtactgctatcagcctatcatcatccccaataatggcgtacgtacctaaataaacgacctcccatgcatgcaccaacggggagagttaagtgtgtaataattaacggccggtatgtctgtacgacggcgcgtcttgtttgtaacaataaaccccttgttttgtacgtgtaataataaaccactgtccacgcgccttacacgtaaattcatgtttgtttggatacaaaaaaaaaaaaaaaaa

SEQ ID NO: 10796 - protein, 103 aa, Zea mays; identical to SEQ ID NO: 10428
  misc_feature: Ceres CLONE ID no. 1679066
  misc_feature: Ceres CDNA ID no. 40352081

SEQ ID NO: 10797 - DNA, 799 bp, Zea mays
  misc_feature: Ceres CLONE ID no. 1679127
  misc_feature: Ceres CDNA ID no. 36706839
  CDS (297)..(623): REFERENCED BY SEQ ID NO: 10798
agaaccagctaataaccacgtccttgtacatatagtagtacctgcagtctctggtcgacgatggcgtgtccgaggcagggaagtacacagcagaagctagcaaacagcatgagtggtgccatggacatggcgcgagccgcgtgacccagcaaactacatacatacacctagcagagaccagagattcagagctcaggatgtgtcgttgagtgcgaagctgccgatcgaaggagggagagaaggttctcgaccgtcgtcttgctgcttgccggtcgcggtcgtctcagtcatcgaccatgtggagcttggtgcggcagggcctccgatggggcagggggcggcggcggcggcgaacggcgcgggtggtggacgagagcgcgctcggcgcagacggcggcgatatagacggcggtgctgccgcggcgggcggcggcgtggtgacgccgacgctgggcggcgccctggccagggcgctgctggcgctggcgtgcgccgtccgcttggacggcgaggacgtcggcgcggccgaggaggcgtgggccgccaccgggtggcggccgcgcgccgacgaggtcagccacctcatggtgcgcgagagcatgcgctacgccatctacgcgtaggcgaagcaagccgtatatatgtatactcagtacatatgcaactgcaattatgtatgcatgtaaccattggcccatacgtacaacatatatgttagttttggcctctagatctgtgtgtaatatatacgaagtagtttcagctagtgcagtgttctttctaaaaaaaaaaaaaaaaa

SEQ ID NO: 10798 - protein, 108 aa, Zea mays
  misc_feature: Ceres CLONE ID no. 1679127
  misc_feature: Ceres CDNA ID no. 36706839
  misc_feature: Homolog of GI Number: 66778899 NR Desc: UvrD/REP helicase
MWSLVRQGLRWGRGRRRRRTARVVDESALGADGGDIDGGAAAAGGGVVTPTLGGALARALLALACAVRLDGEDVGAAEEAWAATGWRPRADEVSHLMVRESMRYAIYA

SEQ ID NO: 10799 - DNA, 1012 bp, Zea mays
  misc_feature: Ceres CLONE ID no. 1679181
  misc_feature: Ceres CDNA ID no. 40352082
  CDS (1)..(822): REFERENCED BY SEQ ID NO: 10800
attcccatttccctcgccctgcgccgcctgcgtccacctccgctcgccgctctccccgcgtatccctctcatacgcagctcgcccagatgtcgtccgtggcgtcgaaggtggcggtgccggagtctgtgctccgcaagcggaagcgcgaggaacagtgggccaccgagaagaaggagaaggccctagtcgagaagaagaagtccatcgagagccgcaagctcatcttcacccgcgcaaagcagtacgccgaggaatacgatgcccaggagaaggaactggtgcagcttaagcgtgaggcccgtttgaagggtggtttctatgtcagtcctgaagcaaagctgctctttgtggtccgcatccggggtattaacgccatgcaccctaagaccaggaagatcttgcagcttctgcgattgaggcagatcttcaatggtgtgttcctcaaagtcaacaaggcgactattaacatgctacgcagggttgagccatatgttgcatatgggtacccaaacttgaagagtgtcagggagttgatctacaagaggggctatggaaagctgaacaagcagaggatccctctgtccaacaaccaagtcatcgaggagggcttgggcaagcacaacatcatctgcattgaggatcttgttcacgagatcatgactgttggcccacacttcaaggaggccaacaacttcctgtggccattcaagttgaaggcgccgctgggaggcctgaagaagaagaggaaccactatgtggagggcggtgatgccggtaaccgcgagaactacatcaatgagctcatcaaaaggatgaattaggttcacgatcaagctcattgatagtaccctgtgctctaagtgacttcttgtgctatccttattttatattagaaagttggatcgtggatgaatattcatgcagttttgatgtttcgaactagacgtgtatggaagaaatctgatcttcttttcggaggtttgggattaattagaaaaaaaaaaaaaaaaa

SEQ ID NO: 10800 - protein, 244 aa, Zea mays
  misc_feature: Ceres CLONE ID no. 1679181
  misc_feature: Ceres CDNA ID no. 40352082
  misc_feature (13)..(83): Pfam Name: Ribosomal_L30_N PFAM Desc: Ribosomal L30 N
  misc_feature (84)..(136): Pfam Name: Ribosomal_L30 PFAM Desc: Ribosomal protein L30p/L7e
MSSVASKVAVPESVLRKRKREEQWATEKKEKALVEKKKSIESRKLIFTRAKQYAEEYDAQEKELVQLKREARLKGGFYVSPEAKLLFVVRIRGINAMHPKTRKILQLLRLRQIFNGVFLKVNKATINMLRRVEPYVAYGYPNLKSVRELIYKRGYGKLNKQRIPLSNNQVIEEGLGKHNIICIEDLVHEIMTVGPHFKEANNFLWPFKLKAPLGGLKKKRNHYVEGGDAGNRENYINELIKRMN

SEQ ID NO: 10801 - DNA, 1014 bp, Zea mays
  misc_feature: Ceres CLONE ID no. 1679236
  misc_feature: Ceres CDNA ID no. 40041560
  CDS (28)..(429): REFERENCED BY SEQ ID NO: 10802
aagtccgagctcccttctcttcttcccatggcggctgtcgtcgagttccctgcgcaagcgtcgcgcgcagccgcgtcttcaagcccgggtcttcttcctcccttgctcgccctgggtcctgctccctgtgccgcttctctaccgaccgagctcctctgcagctccagcgccggccagagctcccctgcgtgtcgtgtgcccatctctatagcgcagctccccacctccatggccgccgcgctcctccctgccccagcccggcgtttctttggccgaccgagctccctcgccatggagttcccgacgctctgcccagccccagcgcttggcttccatcctagccgcgccctactcggcttctccggtgccggccgccgctccaagtcgccgttccagccgacctcattactcgttgctcctgatggctgattggaccttgtaatgttgcgacaacaacacgcaatgccgcccggccgcccgttagatgctcgatacaacgcctgaaccggaaaccatcgctgttcctgtgttcatcacaccaggtgcgctagttgatcacgtgatgcggaagtcaagctgagtcgaccacgagatgctgttaagcgtgtgtttcttcgcaagggatactgatgaataaacttgaagatttgcatgatcggatcaagcgctaggatgtgagatgctcgccaagtggacgtcatctaacaacactaacctagtgttatcccaggttataagtttgttctgttgtggatggtgctaagtgccggtgggctcggccttcttatataagtatatcccatctttagcttctctatcgaggattgtctcttaagctagcatgtattttaaaacttataaatgttttatacattcaaattgtaatctttttgaatcaatttcttttgtaatcaactccgatgatatatattgtaatcttgttataacttgtaaatgttataacttgtaaccattctgtaataaagaatttccgttgaaaaaaaaaaaaaaaaa

SEQ ID NO: 10802 - protein, 133 aa, Zea mays
  misc_feature: Ceres CLONE ID no. 1679236
  misc_feature: Ceres CDNA ID no. 40041560
MAAVVEFPAQASRAAASSSPGLLPPLLALGPAPCAASLPTELLCSSSAGQSSPACRVPISIAQLPTSMAAALLPAPARRFFGRPSSLAMEFPTLCPAPALGFHPSRALLGFSGAGRRSKSPFQPTSLLVAPDG

SEQ ID NO: 10803 - DNA, 567 bp, Zea mays
  misc_feature: Ceres CLONE ID no. 1679462
  misc_feature: Ceres CDNA ID no. 36707589
  CDS (117)..(335): REFERENCED BY SEQ ID NO: 10804
actagaaaaagagcgaacgatccagaagcagaagccaccgatcggcgtgccgcgtgcgtgaggcgatcggagcatcccgtcccgaggaggaagacaaccggcgacgcggggggaacatggggaagacgccggtgcggatgaaggcggtcgtgtacgcgctgtcgcccttccagcagaaggtaatgccggggctgtggaaggacatcaccaccaagatccaccacaaggtcaccgagaactggatctccgccacgctcctcctcacccccgtcgtcggcacctaccaatacgccatgtggtacaaggagcaggagaagctttcccacagatattaaatgcgctgcccttgacagacagcactcggagttttcatgatgggtttcataatcctcccatgatgatttaacatttgtttgatcaatttcagttcaacgccttttcatcgttccatatgcatatatggtatccgtgtctggcaaacttattttgaggcttgctaaatatgtaccttttgtctctgaagttgttaaataaagcaaattaacttcccaaaaaaaaaaaaaaaaa

SEQ ID NO: 10804 - protein, 72 aa, Zea mays; identical to SEQ ID NO: 4918
  misc_feature: Ceres CLONE ID no. 1679462
  misc_feature: Ceres CDNA ID no. 36707589
  misc_feature: Homolog of GI Number: 34898476 NR Desc: EST AU082567
  misc_feature: Homolog of GI Number: 32400883 NR Desc: cytochrome reductase
  misc_feature: Homolog of GI Number: 6630544 NR Desc: putative ubiquinol
  misc_feature: Homolog of GI Number: 34365575 NR Desc: At5g05370
  misc_feature: Homolog of GI Number: 633687 NR Desc: ubiquinol

SEQ ID NO: 10805 - DNA, 939 bp, Zea mays
  misc_feature: Ceres CLONE ID no. 1679636
  misc_feature: Ceres CDNA ID no. 40041561
  CDS (24)..(827): REFERENCED BY SEQ ID NO: 10806
agttctactgtgccagccggaacatgtcaaccacaggccagcgaagctcccgtctccggccgtggaggaagcaagtacctataaatacgcccccgcaagcaagcccgcgccagcgccaccgacccagctgcaaacggccggccatggactccaccgagcccccgccggcgtcgccttcctcgcccgggccaccaggcggccagccgtccccgccgaagcggcccgcggggcgcaccaagttccaggagacgcggcacccggtgttccgcggggtgcggcggcgcgggcgcgcggggcggtgggtgtgcgaggtgcgcgtgccgggcagccgcggggaccgcctgtgggtgggcacgttcgacacggccgaggccgccgcgcgcgcgcacgacgccgccatgctcgcgctctgcggcgccgccgccagcctcaacttcgccgactccgcctggctgctccacgtgccgcgcgcccccgcgggcctgcccgaagtccagcgcgccgccaccgacgccgtcgcggcgttcttgcggacgcagcaaccgcgcggcggcggggacgcgcccgccgccgcctcgcagggtcagcgcgccaatgccgccacggagacggagttggaccacgccggcgcgtcggcggcggcggtggacggtggcggcggcagcgtggttgaggtggatgtgttcggcggcatggacgacgccgggtcctactacgcgagcctggcgcaggggctgctcatcgacccgccgccgcccgccgtagagtgccccgaggaggaggatgacgattgcggcggcgctggtgagatggagctgtgggactagccacctagctctagccgccccccgagttaggagtagggcagaggattaacgaacgctgtgcgtgcccgcaaacaaaacaatctgattttcgttttaaaaaaaaaaaaaaaaa

SEQ ID NO: 10806 - protein, 227 aa, Zea mays
  misc_feature: Ceres CLONE ID no. 1679636
  misc_feature: Ceres CDNA ID no. 40041561
  misc_feature: Useful for making plants with modulated growth and phenotype characteristics
  misc_feature: The sequence is a functional homolog of  SEQ ID NO 1248 in the  10/374,780 US patent application
  misc_feature (39)..(104): Pfam Name: AP2 PFAM Desc: AP2 domain
  misc_feature: Homolog of GI Number: 50948187 NR Desc: putative CRT/DRE binding factor
  misc_feature: Homolog of GI Number: 63098621 NR Desc: CRT/DRE binding factor 2A
  misc_feature: Homolog of GI Number: 63098610 NR Desc: CRT/DRE binding factor 5
  misc_feature: Homolog of GI Number: 63098614 NR Desc: CRT/DRE binding factor 1C
  misc_feature: Homolog of GI Number: 63098600 NR Desc: CRT/DRE binding factor 3
  misc_feature: Homolog of GI Number: 72059440 NR Desc: CBF
  misc_feature: Homolog of GI Number: 60547437 NR Desc: HvCBF3
  misc_feature: Homolog of GI Number: 60116270 NR Desc: C
  misc_feature: Homolog of GI Number: 60116232 NR Desc: C
  misc_feature: Homolog of GI Number: 74273647 NR Desc: HvCBF12
MDSTEPPPASPSSPGPPGGQPSPPKRPAGRTKFQETRHPVFRGVRRRGRAGRWVCEVRVPGSRGDRLWVGTFDTAEAAARAHDAAMLALCGAAASLNFADSAWLLHVPRAPAGLPEVQRAATDAVAAFLRTQQPRGGGDAPAAASQGQRANAATETELDHAGASAAAVDGGGGSVVEVDVFGGMDDAGSYYASLAQGLLIDPPPPAVECPEEEDDDCGGAGEMELWD

SEQ ID NO: 10807 - DNA, 1336 bp, Zea mays
  misc_feature: Ceres CLONE ID no. 1680197
  misc_feature: Ceres CDNA ID no. 40352083
  CDS (156)..(1100): REFERENCED BY SEQ ID NO: 10808
aatgtacccgcggtaacgcagtaacggcgtagggcgtaacgtcccctcccccgtgaacggtgtacccgaccctcttcgccggccgtcgcctatccaaatccgtcacggacgcttccacgcgaccaagcagccacgcggcgctggtctggccggccatgtcctgcctcgcggcgccgccggctgcaccgccaaaggcgggggagcgcatgctccgcgccgccgctcctttgcgctcgccttcgccgtgccggggcctgcattacgcggtgcgggggactggagggcgagaagccgggtgcggccggcggcagctggcgctgctgcggtgctccccagctggcgagtccagggcgtccggggacggcggcctttccagcttctgtataattgaaggtccagagacgatcgaggactttgctcaaatgcaatcgcaggagattgaagacaacatcatgagccgacgcaacaaaattttccttctgatggaagaggttagacggttgcgagtgcagcagcgtatccgaacttctgaaagcaaagatgccaacactgaaggaaatgaaatgcctgagattccatcaactattccatttatgcctgatgcgtcaccaaagactatgaagcaactctatatgacatcgttctctgtcatatctgggataatcatttttggaggcttgatagccccagtacttgaactgaaactagggctgggtggcacatcttatgaagattttataaggaccttgcacttacctcttcaattgagtcaggtagatcctatagtggcatcattttcaggtggcgcagttggtgttatctcagctttaatgttggtcgaagtgagaaatgtcaggcagcaagagaagaaaagatgcacatattgccatgggactgggtacttgccatgtgctcgctgttctgctagtgggatgttattgaacacaaagcagttttcattattggggcataatatgtggtcaatgaaaggaaggtgtcagaattgttctggagctggaaaggtgatgtgtccgacgtgcttgtgcacaggaatggcgatggcaagtgagcatgatccacggattgacccttttgattagtttgatatgacaatacgctttttgtctgtttcgtggaaaatatgttgccgataacagcaataaactcatgtttgtatgtacgttatgtttgttactacgtgatcacttgagaggagttgagtgcaacccttgtccaaaagaggacactacaaatgtaggcttgtctgaaccacagaataaaaaaaaaaaaaaaaaaaaaaaaaaaaaaaaaaaaaaaagaaaaaaaaaaaaaaaaa

SEQ ID NO: 10808 - protein, 225 aa, Zea mays
  misc_feature: Ceres CLONE ID no. 1680197
  misc_feature: Ceres CDNA ID no. 40352083
MQSQEIEDNIMSRRNKIFLLMEEVRRLRVQQRIRTSESKDANTEGNEMPEIPSTIPFMPDASPKTMKQLYMTSFSVISGIIIFGGLIAPVLELKLGLGGTSYEDFIRTLHLPLQLSQVDPIVASFSGGAVGVISALMLVEVRNVRQQEKKRCTYCHGTGYLPCARCSASGMLLNTKQFSLLGHNMWSMKGRCQNCSGAGKVMCPTCLCTGMAMASEHDPRIDPFD

SEQ ID NO: 10809 - DNA, 1033 bp, Zea mays
  misc_feature: Ceres CLONE ID no. 1680209
  misc_feature: Ceres CDNA ID no. 36707591
  CDS (338)..(778): REFERENCED BY SEQ ID NO: 10810
acacaaacctgagccaaagccagagcccgaaccaaaaccagagcctaaaccagaaccaaaaccagagccaaagccagagccgcaaccaaaaccagagcatctcccatcttcatcttcccgcagttccatcttccgctccctcccttcatcgcgctcggcacacaggcgacggcggcggagctcatgctcgggctctcagcgaaggcatcagctgcttcccctcccgcctcttgccaatcgcctcgagccctcgcctccggtcctccgcacaccggccggtgatcctgcgtcttgtcattcgtgatttcatacttcaggtatctgcatctcaggggaaatggcaagcaaagcaggtggtgaaggcaaagaagccataaacgagcaagtaattgccaacacttatgccaacatgcgtactgaaatgaaccagctctacaccaagatcacagagctggagatggaagtcagtgagcactcccttgtgattggtgcgatcgagccgctggacccctcgaggcgctgttacaggatgattggtggggtcctggtcgaaaggaccatcaaggaagtcctgcctgctgtgaagcgcaacaaggagggccttgaagaagtgattgctcgcatgcacgaggcactggagaggaagaagaaagagatcaccgagtttgagcttaagtacaagatcaggatccggaaggctgacaatgacgcagaggacgaaggcggcaagaaggaaggcactgcacagggagtccttgttgggcctgctgtacagtaacacttaattagatggattttgtgtaaaagatgaggaccgatgtgaactgaagtagtttctttgtcacctcttcgggtgctgcagcaatccaagtttttgtttgttattgatgacacatcgcaaatctcccaggactagaatctctgttcgtgattccttttactatcttctcaaaataattgtggattagtcatctgcatgacttcatttcaactgatgctgaaatattgtggtgaagaaaaaaaaaaaaaaaaa

SEQ ID NO: 10810 - protein, 146 aa, Zea mays
  misc_feature: Ceres CLONE ID no. 1680209
  misc_feature: Ceres CDNA ID no. 36707591
  misc_feature (16)..(121): Pfam Name: KE2 PFAM Desc: KE2 family protein
  misc_feature: Homolog of GI Number: 77551518 NR Desc: prefoldin subunit 2
  misc_feature: Homolog of GI Number: 77555734 NR Desc: prefoldin subunit 2
  misc_feature: Homolog of GI Number: 21281273 NR Desc: putative prefoldin protein
  misc_feature: Homolog of GI Number: 74006277 NR Desc:  similar to prefoldin 2
  misc_feature: Homolog of GI Number: 55588600 NR Desc:  similar to prefoldin 2
  misc_feature: Homolog of GI Number: 31981577 NR Desc: prefoldin 2
  misc_feature: Homolog of GI Number: 60811895 NR Desc: prefoldin 2
  misc_feature: Homolog of GI Number: 62901934 NR Desc: prefoldin subunit 2
  misc_feature: Homolog of GI Number: 68362860 NR Desc:  similar to prefoldin 2
MASKAGGEGKEAINEQVIANTYANMRTEMNQLYTKITELEMEVSEHSLVIGAIEPLDPSRRCYRMIGGVLVERTIKEVLPAVKRNKEGLEEVIARMHEALERKKKEITEFELKYKIRIRKADNDAEDEGGKKEGTAQGVLVGPAVQ

SEQ ID NO: 10811 - DNA, 974 bp, Zea mays
  misc_feature: Ceres CLONE ID no. 1680604
  misc_feature: Ceres CDNA ID no. 36707592
  CDS (105)..(731): REFERENCED BY SEQ ID NO: 10812
aatactgccgaaggtaatcccgttcgcagtcgcagttcacctacgcggaaaatcactagtgattcactgaacaaaaaaaaattacaagaaggaatcgagagcaaatgctatcttcaaccacactccgaccgccggcgccggcgccggcgccggcacacctcaccatctgctcctcgcccgcagcgtggcggcgtgcgccggcggtgcgcgcggtgcggaactacgactccatcccgaagcgggagcccttcagctccagccgcagcatcctccacgagttcctcaggcaggacaagcccctcatccagcgcaccaaggaccagatcacagattattgcacggccatcgaaggcgatgagtgctgcagctgttgggacgcttactttgaactgaataaacttgagcaagagctgcccaaagacgaaatcgcaaggatggtgaaggactcggagggtgacgtgaggtacctgatagagagcatccaccatcgctcggatctgcggaagaaggtggcagagaagtctcgcaattcagtaccgtcaagctcccagggtagtagagccgcaaagccaaggccgttccccgtgcctgatgggataccgaaaacgcaagaagagctcgctgaagaagaagaggcgttgatgccggagtctccatacacgaggctgctgagaaggatgggaaggtaccctgattggtacaccccacgccctgatcatgagaccgactgaatcgagttgcccaccatcctagtgtcccttgtgggagtttttggagcatggtaatctgaggctccttttatggcctgtggtatgtggtaagattagatttgtatctatgcagaattgcagattagggtgttcttactcttttccaattgtactaatgaaaaccggtgtgtgctttatgctgtaaatatgtggtaaatagctgaacgttttattcgaggttctgtgtaaaaaaaaaaaaaaaaa

SEQ ID NO: 10812 - protein, 208 aa, Zea mays
  misc_feature: Ceres CLONE ID no. 1680604
  misc_feature: Ceres CDNA ID no. 36707592
MLSSTTLRPPAPAPAPAHLTICSSPAAWRRAPAVRAVRNYDSIPKREPFSSSRSILHEFLRQDKPLIQRTKDQITDYCTAIEGDECCSCWDAYFELNKLEQELPKDEIARMVKDSEGDVRYLIESIHHRSDLRKKVAEKSRNSVPSSSQGSRAAKPRPFPVPDGIPKTQEELAEEEEALMPESPYTRLLRRMGRYPDWYTPRPDHETD

SEQ ID NO: 10813 - DNA, 1020 bp, Zea mays
  misc_feature: Ceres CLONE ID no. 1680654
  misc_feature: Ceres CDNA ID no. 35383534
  CDS (119)..(712): REFERENCED BY SEQ ID NO: 10814
aacccttccccacactgctgcgccgcgcagtcttctgcttctccccaccctcgcctcagcttccctgccgttccctccgatcaccagctgcttgtgctgctgagtgctgagggtagcgatgaagctcttgaaccagcccatcagcccaggcggccatctcgtgccggcgcagccgagcaccacggcggccgcggggcggtcccatgcgcactgccctcggtggcaggcgcagacgctgcgccgggacagcagctacgtcggcgtcgagcacatcgacgggaccaccgcgtccgtcccagtcccagtcccagtcccagtcgcggccccgttcaagccgctcacgctcgacttcctgcggtcgctcctggaccggaactgcagcatggcccccgccgtcccggacggcgaggccagcgccccgccgccgccgcagatggtcgcgctccgggtgctggtgacctccgccgtggagctggacgcgcgccaggccgagcgcatcgcgcgcaagatgcgccgcctcaccggctttgtcgacctcaaggtagagaccgccgtggacgcgtccctcatcgccggcttcgtcgtctgctacggcaccgacgactcgcacgtcatcgacctcagcgtcaggggccagctcgcggcgctcaagagccgcgtcgactccatcgaccagaccgcgcatgcccacggacacccacaccaccactgaccgtcgatccaacacctgatgcaccggagcaaagcacagcgcgccgtcaccgtgctacagcttacaatacaagcctatctccatgattattgcacagaatgacagaaccgaacgccatggcaacaacagttttcctatctaatgttgttgtaaatcgatcgcgacaaaacttagcttctgctaccttccttcctgctgagcctgtatacgtttctattgctaaagaaacgatcaaacgaacgctattgtatatttgatcgaagtggaaacagcatgcagcttaaaaaaaaaaaaaaaaaaaaaaaaaa

SEQ ID NO: 10814 - protein, 197 aa, Zea mays
  misc_feature: Ceres CLONE ID no. 1680654
  misc_feature: Ceres CDNA ID no. 35383534
  misc_feature (24)..(181): Pfam Name: OSCP PFAM Desc: ATP synthase delta
  misc_feature: Homolog of GI Number: 67988031 NR Desc: ROK
  misc_feature: Homolog of GI Number: 55243783 NR Desc: ENSANGP00000017440
  misc_feature: Homolog of GI Number: 67987133 NR Desc: Oligopeptide/dipeptide ABC transporter
  misc_feature: Homolog of GI Number: 66778264 NR Desc: LigA
  misc_feature: Homolog of GI Number: 5821151 NR Desc: RNA binding protein
  misc_feature: Homolog of GI Number: 72547023 NR Desc: proteophosphoglycan ppg4
  misc_feature: Homolog of GI Number: 6649242 NR Desc: splicing coactivator subunit SRm300
  misc_feature: Homolog of GI Number: 72547041 NR Desc: proteophosphoglycan ppg1
  misc_feature: Homolog of GI Number: 71891780 NR Desc: KIAA0324 protein
  misc_feature: Homolog of GI Number: 19923466 NR Desc: splicing coactivator subunit SRm300
MKLLNQPISPGGHLVPAQPSTTAAAGRSHAHCPRWQAQTLRRDSSYVGVEHIDGTTASVPVPVPVPVAAPFKPLTLDFLRSLLDRNCSMAPAVPDGEASAPPPPQMVALRVLVTSAVELDARQAERIARKMRRLTGFVDLKVETAVDASLIAGFVVCYGTDDSHVIDLSVRGQLAALKSRVDSIDQTAHAHGHPHHH

SEQ ID NO: 10815 - DNA, 792 bp, Zea mays
  misc_feature: Ceres CLONE ID no. 1681916
  misc_feature: Ceres CDNA ID no. 35383535
  CDS (144)..(659): REFERENCED BY SEQ ID NO: 10816
aacaaccacttggtgggcgcaccgcagctgagcctgtagagcacgagcgcgcccgtgagagtggaaaagagagggctggccccgccggcctgatcagatcagcggaaggcacaccgagctcttgcctgcctccactccacccaatggcgatgccgagggcgccgggcgcggggtcgctccgcttcctgggcctgctgaagcagccggagtccgacgccgccgccccattcgagctcgacgagcgcgacgtgttgtggccgacgggcggggggcagcaggacggttgggccgccccgccggcgaggcggcgtcgcgcgcacgccatgccgctgtacagcttcgggctgtcgtcgctgctcgccgaagactgcggcggtggggtgcccgtgcccgtgccggggagggcgatggcgatggcgccgagcgccgcgccgaggcagtcggcgccggtgcgcgtgccggcgccgtggccaggcggcaggagggccgacgaggacgaggaggacggcgaggaggtggtgccgccgcacgtggtcgcggcgcggcgccacgcgcggtcgtcgtccgtgctggagggcgccgggcgcacgctcaagggccgcgacctccgcagcgtccgcaacgccgtgctccggcagaccgggttcttggacctgtgaacgtccgcaggcagccatggcacaagacgccgatcgatacattgttgtgtgtctgtgtgtcgttctagcgtcccttacaagttacacatgaagaactgaactcaatacgttcaatcaaaaaaaaaaaaaaaaa

SEQ ID NO: 10816 - protein, 171 aa, Zea mays
  misc_feature: Ceres CLONE ID no. 1681916
  misc_feature: Ceres CDNA ID no. 35383535
  misc_feature: Homolog of GI Number: 50927168 NR Desc: OSJNBb0103I08.8
  misc_feature: Homolog of GI Number: 56785008 NR Desc: prolyl 4
  misc_feature: Homolog of GI Number: 66778264 NR Desc: LigA
  misc_feature: Homolog of GI Number: 66778899 NR Desc: UvrD/REP helicase
  misc_feature: Homolog of GI Number: 50924101 NR Desc: OJ000126_13.10
  misc_feature: Homolog of GI Number: 15983450 NR Desc: AT3g15040/K15M2_18
  misc_feature: Homolog of GI Number: 67984635 NR Desc: Exodeoxyribonuclease V
  misc_feature: Homolog of GI Number: 66776103 NR Desc: LigA
  misc_feature: Homolog of GI Number: 66779191 NR Desc: LigA
MAMPRAPGAGSLRFLGLLKQPESDAAAPFELDERDVLWPTGGGQQDGWAAPPARRRRAHAMPLYSFGLSSLLAEDCGGGVPVPVPGRAMAMAPSAAPRQSAPVRVPAPWPGGRRADEDEEDGEEVVPPHVVAARRHARSSSVLEGAGRTLKGRDLRSVRNAVLRQTGFLDL

SEQ ID NO: 10817 - DNA, 1405 bp, Zea mays
  misc_feature: Ceres CLONE ID no. 1682994
  misc_feature: Ceres CDNA ID no. 40352084
  CDS (255)..(1328): REFERENCED BY SEQ ID NO: 10818
aagaacctcgcttccaatctgccctcccgtgtccccctccctgtccgattccccacagcagcgcctcgccctcgtcctcctcctccagtccggatcgccatttcccaccgatccgtcccggcatcggcatggctgcgcccacgccaaaggcgccggcgcccagtgcttcggcagcctagcgtttgtttgcctccgaggatttccgcctatcgcgttaccggatcttcggtgggccggcgaccctctacgccactatgagctccgacgggcgcctccgccgcgcgctggccgcgttcggcggcgacgtgtgggacctcgtggacgcggcgctcgccgccgccgcgcgggacagccccggcgacctgcgcgcgcgccgcgacggcatcgtccagcgcctctacgcaggggcagcccgctgccgcaactgcgacgccgacgcaaccccggcgcctgctcagccgaggaaggccaatgacgccgtcgctgctgctgctgctgcttctcctgcggcggcggcggcgtcggcgtttccggcctcgcctgaacaggaggtcgacgcggacggcctcgacgacgtcgacgacgcggccgacgctggcatggagagcaagattctggcgatcagggatttcctggaggacccggaccagtctgaggacgacatagtgagcctacttcagaacctagcagacatggatatcacctacaaggctctccaggacacggatatcggccgccatgtgaatggcctgcgtaagcacccatccagcgaggtccggcaactggtgaagctgctcgttaggaaatggaaggaaatagtggatgattgggtgaggctgcacaactcaggtggtgatggtagtggctccatcataagcgacggtgactcacctgacaaagtccaatccaagtaccatcaaaatactcatgcttcagacttcaaatatccccccagcccacagaggcataatgttttcagctcagagagatctagcaaccacaatttggtggaatcaacaacggagaagcgtagatcgagccctgctcctgcatacaataataccaagcagaacaacagcaacaactattccagtatttcatcgtcagcaccagctagagcaatacgggagcaaaagaacactcttttggattctgagaagctagactcagctaggaagaggcttcaggaaaactaccaggaagcgcaaaacgcgaaaaagcagaggacgatacaagtgatggatatccacgacataccgaagcccaagaacaggaacaccttcgtgcgcaagagcggcggcggcggattcccggcaaagcaccggtgatctctgcctgaccgccgtcggacctgtagcggactcagcgtatttatttctgtactagctaaaaaaaaaaaaaaaaa

SEQ ID NO: 10818 - protein, 357 aa, Zea mays
  misc_feature: Ceres CLONE ID no. 1682994
  misc_feature: Ceres CDNA ID no. 40352084
MSSDGRLRRALAAFGGDVWDLVDAALAAAARDSPGDLRARRDGIVQRLYAGAARCRNCDADATPAPAQPRKANDAVAAAAAASPAAAAASAFPASPEQEVDADGLDDVDDAADAGMESKILAIRDFLEDPDQSEDDIVSLLQNLADMDITYKALQDTDIGRHVNGLRKHPSSEVRQLVKLLVRKWKEIVDDWVRLHNSGGDGSGSIISDGDSPDKVQSKYHQNTHASDFKYPPSPQRHNVFSSERSSNHNLVESTTEKRRSSPAPAYNNTKQNNSNNYSSISSSAPARAIREQKNTLLDSEKLDSARKRLQENYQEAQNAKKQRTIQVMDIHDIPKPKNRNTFVRKSGGGGFPAKHR

SEQ ID NO: 10819 - DNA, 997 bp, Zea mays
  misc_feature: Ceres CLONE ID no. 1683010
  misc_feature: Ceres CDNA ID no. 40041562
  CDS (617)..(790): REFERENCED BY SEQ ID NO: 10820
atcagtttggccgttctattcggatcaccctcttactggtgctgagtatctttctgattggtcagtgcccaacttgccttgttttaaactgtgggaaaagtgataaattactcacatagtacactataaggaaaaaaacacagaaacctgtcatgcttttggattatataatctgccctatcctccgtggatatctcaatggcttgcagttcttgcctgcaggggtttgttttttctatcataaatagcttaaagcataacttcttgtatatccacgcttttggtgtggcattgttttgctatttcttcctctgtttgttatcggttaacatagtctaaaaaaaactacgaccgtgttgcatatactgatgtacagtgttatggcgtatgtttgaaaatttacatttggcaaggcaagtgcaacagatataggtcgaaaccgatgttctgttttcgtcaaatactaattgtcacattatgtgctctgcagtgccatttctcgcctcggcatgacaaggcatgtattgcttcaccggtgaggaacattggggcagcttaccatggtcctgctcgtactacatacagatcatgactggtggtgttctctcgccggcaaatgcagcaaaccaaccatgtctttcctgtgtggtgtggctgctgcatatgtgacaggaaaagaagcacggcggtgaaggtttcaactgtgcaatgcgtgatgctccgataccatgaactcctcaccgggcgcataaccatgctaagatttatcagggttatgataaatttgtgatggctgattgctgccaaaggaggtggctgttctcatctcactactctatatcccacgagtgaaagcaattgtaaaaagttctagagccactctatatcccacgaacgaaagcaactgtaaaaagttctagagctggtaggataagtcctgaatactgttattgataataatacatttaatactgtatttgccaaaaaaaaaaaaaaa

SEQ ID NO: 10820 - protein, 49 aa, Zea mays
  misc_feature: Ceres CLONE ID no. 1683010
  misc_feature: Ceres CDNA ID no. 40041562
MFCFRQILIVTLCALQCHFSPRHDKACIASPVRNIGAAYHGPARTTYRS

SEQ ID NO: 10821 - DNA, 1383 bp, Zea mays
  misc_feature: Ceres CLONE ID no. 1683255
  misc_feature: Ceres CDNA ID no. 40041563
  CDS (453)..(950): REFERENCED BY SEQ ID NO: 10822
aatctccttgtgcaccgtcgaagctccctgcctgcatcgcttccctgcctccccgagcggatgtgccatctctcacctcgtccgtgcctctgtactagagttcaccggatcccgcgcgctgttgtgccatgatcgccgtggagcttccccgccgcgccccagctcggatcttcctctaccggcgctcgcccagtctgggcaccgcagcttccttctctgctcggcgccgtccctggctccaactcggccatggccgctgcgccgcgcccctgcgctcgccgctggagctctctgtaccgcgcgccctcgagctcccacgcgctcggccgcccagcttcctgcgccgtagcttttctcctgagctccctcgccatggtcgcccagcccagccgtacctgctccctccctgtgctcgccatggtcgcgcgttgtcgcccagctagccctcagccatggacgtgccaagccgcttccttcctagccggccgtcgtgggtacctgggtctcctcctaatttgatttggaactgctgcgcctcagcctcgatctgtcgcatcccggctcgccgcgcgcgcgcctgcttcctgtgcgcgcagccgctccctccccagccgcaaagcaccccgttaagttctcctccgccgggttgtcgtacatgcgaaactgctcgcgatcggcatcgattcaaccgctcgaccctgttccctggccaccgctcgactctgagctctggttcctgcgcgctgttgttcccctcgcagcctgtggaggtggacctcggcagtgtccccatcgccgttgaactcccatacatgttcctctctgttcgcttgtcgttggttccggccaggtctcgcgcgcgtggttttgaagctctgcgcgttcgtcgtgccgcgctgtgtgctagtgttctcttccggcagaactcgccgtcgaccatgttcaagtgattgctcggctccgcgcctcccttgcatctcgctcgacagactgctcgctctgctccagctcgcgtccatggacatcggactgtatccctcaagcagctgtgtctccgtcatactttggtcttcaatctcgctgctggcagacaccggttctcatcctcgccaacccctgctcggccccagctcgatctccgcctcgccatcaccctccgtcgcagcaccgtgtcgatgacttgcgattctcgcctttgtgctcgacacaagggctgaaccggaatccttgccatattcgccgatatcatatcaaatttagtcatgggtaagccgattcatatttctgttagcttaattattggattgataaatggatgcgtctagtattattgaattagttcgatgaatgagatatgattattttcaaaaaaaaaaaaaaaaa

SEQ ID NO: 10822 - protein, 165 aa, Zea mays
  misc_feature: Ceres CLONE ID no. 1683255
  misc_feature: Ceres CDNA ID no. 40041563
MDVPSRFLPSRPSWVPGSPPNLIWNCCASASICRIPARRARACFLCAQPLPPQPQSTPLSSPPPGCRTCETARDRHRFNRSTLFPGHRSTLSSGSCALLFPSQPVEVDLGSVPIAVELPYMFLSVRLSLVPARSRARGFEALRVRRAALCASVLFRQNSPSTMFK

SEQ ID NO: 10823 - DNA, 721 bp, Zea mays
  misc_feature: Ceres CLONE ID no. 1683836
  misc_feature: Ceres CDNA ID no. 36707594
  CDS (117)..(509): REFERENCED BY SEQ ID NO: 10824
aaccctgcctgccgtttccatctccatccagttctccgcacccacccacccacccactccagtcctttccccaacccacggcggcggccgtggacgccagggtcttctacctcaagatgaagggggactaccaccgctacctcgccgagttcaagaccggcgccgagcgcaaggacgccgcggactccacgctcgccgcctaccaggccgcgcaggacatcgccgtcaaggagctgccgcccacgcatcccatcaggctcggcctcgccctcaacttctccgtcttctactacgagatcctcagctcgccggaccgcgcctgctcgctggccaagcaggccttcgacgaagctatttcagagctggatagtcttggggaagagtcgtacaaggatagcaccctcatcatgcagcttcttcgtgacaacctcaccttgtggacttctgacatgcaggaggatggtggcgatgaaatgcgggatgcaaacaagcctgacgaggagcagtagtagtcgtcatgccatgccatgccatgcttgtacaaggaccattttcgtgtgtcctttccttcaatcgtcgacctttcgttttgttgttatactgctattgtggaaccctgttactgttactgttagtgtatcctattggcaataatcaaatgtggtatggttgactactatactaatgggtgatcattattcatcaaaaaaaaaaaaaaaaa

SEQ ID NO: 10824 - protein, 130 aa, Zea mays; identical to SEQ ID NO: 4820
  misc_feature: Ceres CLONE ID no. 1683836
  misc_feature: Ceres CDNA ID no. 36707594
  misc_feature: Useful for making plants with modulated growth and phenotype characteristics
  misc_feature: The sequence is a functional homolog of  SEQ ID NO 793 in the  11/479,226 US patent application
  misc_feature (1)..(116): Pfam Name: 14 PFAM Desc: 14
  misc_feature: Homolog of GI Number: 50946923 NR Desc: putative TaWIN2
  misc_feature: Homolog of GI Number: 9798605 NR Desc: TaWIN2
  misc_feature: Homolog of GI Number: 44917143 NR Desc: 14
  misc_feature: Homolog of GI Number: 8099063 NR Desc: 14
  misc_feature: Homolog of GI Number: 44917141 NR Desc: 14
  misc_feature: Homolog of GI Number: 4850247 NR Desc: 14
  misc_feature: Homolog of GI Number: 13928452 NR Desc: 14
  misc_feature: Homolog of GI Number: 44917161 NR Desc: 14
  misc_feature: Homolog of GI Number: 2879818 NR Desc: 14
  misc_feature: Homolog of GI Number: 47558857 NR Desc: 14

SEQ ID NO: 10825 - DNA, 550 bp, Zea mays
  misc_feature: Ceres CLONE ID no. 1683936
  misc_feature: Ceres CDNA ID no. 36707282
  CDS (3)..(356): REFERENCED BY SEQ ID NO: 10826
aggcgaggtctatggcgtcgacggcggggtacctggcgcggcgggcggcgcagaaggagcgggtgcgcctgctctaccgcagggcgctcaaggacacgctcaactgggccgtccaccgccacctcttctaccaggacgcgtcggatctccgggacaagttcgaggccaaccgacacgtggataacctggacgtggtcgataggctcatcgacgatgcggaggctcagtacaggaacttccagcaccccgatccctacattgttccatgggcaccaggcggcactaaattcacaagaaacccccctccacctcaagggatcgagatcatctacaattatggcaaggaggaccagtaaacaagagtcctgcaagcgggggcagaacttccacagttccaaatcacttcctgtttaatcgagttgttgtacgagaaataagaatggaaattactggactccatccatgcttctcatttgcttgttctgataatcatatgctcttcatctagtgcatattgaagtgatgtttcctgtcgtaaaaaaaaaaaaaa

SEQ ID NO: 10826 - protein, 114 aa, Zea mays; identical to SEQ ID NO: 68
  misc_feature: Ceres CLONE ID no. 1683936
  misc_feature: Ceres CDNA ID no. 36707282
  misc_feature (13)..(78): Pfam Name: Complex1_LYR PFAM Desc: Complex 1 protein
  misc_feature: Homolog of GI Number: 53792931 NR Desc: complex 1 family protein
  misc_feature: Homolog of GI Number: 24111283 NR Desc: At4g34700/T4L20_280
  misc_feature: Homolog of GI Number: 29789148 NR Desc: NADH dehydrogenase
  misc_feature: Homolog of GI Number: 28461191 NR Desc: NADH dehydrogenase
  misc_feature: Homolog of GI Number: 50731984 NR Desc:  similar to NADH2 dehydrogenase
  misc_feature: Homolog of GI Number: 6274550 NR Desc: NADH dehydrogenase
  misc_feature: Homolog of GI Number: 4894370 NR Desc: NADH
  misc_feature: Homolog of GI Number: 55631220 NR Desc:  similar to NADH dehydrogenase
  misc_feature: Homolog of GI Number: 57095338 NR Desc:  similar to NADH2 dehydrogenase

SEQ ID NO: 10827 - DNA, 729 bp, Zea mays
  misc_feature: Ceres CLONE ID no. 1684148
  misc_feature: Ceres CDNA ID no. 36707134
  CDS (124)..(531): REFERENCED BY SEQ ID NO: 10828
agattacaaacccgtcctctgtccgtcctaccaccacagctcaccgcggtttggctttctcccctcttccgcacccgcttctcgctccggattccctctgctctttccctaacgaaggtagccatggcggggagaggtaaggcgatcggctcaggcgccgccaagaaggccacgtccaggagctccaaggctggcctccagttccccgtgggaaggatcgccaggttcctcaaggccggcaagtatgccgagagagtcggcgccggcgcccctgtctacctcgctgccgtgctcgagtatcttgctgctgaggttcttgagctggccggcaatgcggcacgtgacaacaagaagacccgcatcgtaccgcgccacatccagctcgccgtccgcaacgacgaagagctctcccgcttgctgggcacggtgaccatcgctagcggtggtgtcatgcccaacatccataacctgcttctcccgaagaaggccggcggcggcagcgccaaggctgcggctggtgacgaggactaagtccttgactacgcctggtggcacgtcccaggatgctgccgtatcaacttgtgtctgtgtagtacgttaggtgttcgttgtagctgggtatgtgggttgctgtaacactgctaaactaagttactcttgtgcttgctaaggattaagttctgtatttgttgctataaaaggtgcatccttgaaaaaaaaaaaaaaaaa

SEQ ID NO: 10828 - protein, 135 aa, Zea mays
  misc_feature: Ceres CLONE ID no. 1684148
  misc_feature: Ceres CDNA ID no. 36707134
  misc_feature (25)..(89): Pfam Name: CBFD_NFYB_HMF PFAM Desc: Histone
  misc_feature: Homolog of GI Number: 50938211 NR Desc: putative histone H2A
  misc_feature: Homolog of GI Number: 50945929 NR Desc: putative histone H2A
  misc_feature: Homolog of GI Number: 536896 NR Desc: protein H2A
  misc_feature: Homolog of GI Number: 77555213 NR Desc: Core histone H2A/H2B/H3/H4
  misc_feature: Homolog of GI Number: 50938209 NR Desc: histone H2A
  misc_feature: Homolog of GI Number: 29824201 NR Desc: putative histone H2A
  misc_feature: Homolog of GI Number: 21593834 NR Desc: histone H2A
  misc_feature: Homolog of GI Number: 17065594 NR Desc: putative histone H2A protein
  misc_feature: Homolog of GI Number: 1154954 NR Desc: histone H2A
  misc_feature: Homolog of GI Number: 21617982 NR Desc: histone H2A
MAGRGKAIGSGAAKKATSRSSKAGLQFPVGRIARFLKAGKYAERVGAGAPVYLAAVLEYLAAEVLELAGNAARDNKKTRIVPRHIQLAVRNDEELSRLLGTVTIASGGVMPNIHNLLLPKKAGGGSAKAAAGDED

SEQ ID NO: 10829 - DNA, 844 bp, Zea mays
  misc_feature: Ceres CLONE ID no. 1684370
  misc_feature: Ceres CDNA ID no. 36706716
  CDS (66)..(740): REFERENCED BY SEQ ID NO: 10830
agtgtgcacgccacaaatcatccaaattaagctaacaacgaacgacaactccacgcagagcaacaatggcgccgccgatgaaggtgtacgggtgggccgtgtcgccgtggatggcgcgcgcgctggtgtgtctggaggaggccggcgccgactacgagatcgtccccatgagcaggtgtggcggcgaccaccgccggccggagcacctcgccaaaaacccgttcggtgaaatcccagttttagaggacggtgacctcacgctctaccaatcacgcgccatcgcacggtacgtcctccgcaagctcaagccagagctcctccgcgaaggcgacctcgaggggtcggcgatggtggacgcgtggatggaggtggaagcccaccacatggagccggccctgtggcccatcatccgccacagcatcatcggccagtacgtcggccgcgaccgcgaccaccaggccgttatcgacgagaacctcgacaggctgaggaaggtgctgccggcgtacgaggcgaggctgtccgtctgcaagtacctggccggggacgtaatcagcgccgccgacctctgccacttcggcttcatgcgctacttcatggccacggagtacgccggcttggtgcacgcgtacccgcacgtcaaggcctggtgggacgccctgctggcgaggccctcggtgcagaaggtcatggcaggcatgccgccggattttgggtacgccagcgggaacataccataggctagagaggtgggcgtccgtcactccagatctgaggtctctgaacctcaacgtttccgataaacatgcatgctttatctactgtttaaaaaaaaaaaaaaaaa

SEQ ID NO: 10830 - protein, 224 aa, Zea mays
  misc_feature: Ceres CLONE ID no. 1684370
  misc_feature: Ceres CDNA ID no. 36706716
  misc_feature (5)..(78): Pfam Name: GST_N PFAM Desc: Glutathione S
  misc_feature (94)..(203): Pfam Name: GST_C PFAM Desc: Glutathione S
  misc_feature: Homolog of GI Number: 11385467 NR Desc: glutathione S
  misc_feature: Homolog of GI Number: 34914740 NR Desc: putative glutathione S
  misc_feature: Homolog of GI Number: 54290815 NR Desc: putative glutathione transferase F4
  misc_feature: Homolog of GI Number: 11177841 NR Desc: putative glutathione S
  misc_feature: Homolog of GI Number: 23504743 NR Desc: glutathione transferase F4
  misc_feature: Homolog of GI Number: 23504741 NR Desc: glutathione transferase F3
  misc_feature: Homolog of GI Number: 695789 NR Desc: glutathione transferase
  misc_feature: Homolog of GI Number: 23504739 NR Desc: glutathione transferase F2
  misc_feature: Homolog of GI Number: 11385481 NR Desc: glutathione S
  misc_feature: Homolog of GI Number: 53791719 NR Desc: putative glutathione transferase F4
MAPPMKVYGWAVSPWMARALVCLEEAGADYEIVPMSRCGGDHRRPEHLAKNPFGEIPVLEDGDLTLYQSRAIARYVLRKLKPELLREGDLEGSAMVDAWMEVEAHHMEPALWPIIRHSIIGQYVGRDRDHQAVIDENLDRLRKVLPAYEARLSVCKYLAGDVISAADLCHFGFMRYFMATEYAGLVHAYPHVKAWWDALLARPSVQKVMAGMPPDFGYASGNIP

SEQ ID NO: 10831 - DNA, 551 bp, Zea mays
  misc_feature: Ceres CLONE ID no. 1684453
  misc_feature: Ceres CDNA ID no. 36707323
  CDS (83)..(364): REFERENCED BY SEQ ID NO: 10832
aatccaccatcacacagcaatccacacaagcacttcgacgtcacacgggcgctgcgcacagacacaccaagcgtcggcaccaatggcttactaccaggaggtggactactgctcggaggaggtgaggtcggtggccccggccggcttcggccgccacggcggcggcgtccagcagcacgtcgtcaaggagaagttcgaggaggtcgacacggtctcacgcgccggcgccaaccaccaccaccaccatggtcaccacggcggccacggcttcgtggtgcgcgagaccagggtcgaagaggacatcaacacctgcaccggcgagttccacgagcgcagggagagcttcctcgccagggctaactgagccgcccggcggccggcatccacgcccgttcgtgcttgcctgcgtgccttatgtatgtctgtggttgactggttgtgcagggtcatcgtacttggctatcgtacgtgcacgcactcagctcctgtacgaattacgacaataagctcgtgacctgaataaaacttcttcgcaaaaaaaaaaaaaaaaa

SEQ ID NO: 10832 - protein, 93 aa, Zea mays; identical to SEQ ID NO: 7384
  misc_feature: Ceres CLONE ID no. 1684453
  misc_feature: Ceres CDNA ID no. 36707323
  misc_feature: Homolog of GI Number: 50902350 NR Desc: P0456E05.27
  misc_feature: Homolog of GI Number: 6478144 NR Desc: putative glycine
  misc_feature: Homolog of GI Number: 50902348 NR Desc: P0456E05.26

SEQ ID NO: 10833 - DNA, 641 bp, Zea mays
  misc_feature: Ceres CLONE ID no. 1684741
  misc_feature: Ceres CDNA ID no. 35383536
  CDS (50)..(355): REFERENCED BY SEQ ID NO: 10834
aatgctcgataaatctctccatcaggcagcacctagctagcagcagccaatgacgaagccttcgcaggtgctgttggcggcgctcgccgcctgggcggtggtcctgctgctgctgtgcgccgccgcgccgcggggcgccgacgcggcgacggcgtgcgacgccacgcagctgacgccgtgcgccggcgccatcatcatcgggaggtcgcccagcgcggcgtgctgcagtaggctcaaggagcagcagccgtgcctgtgcacgtacgcgcgcgaccccaatcttcagcgctacgtcaactcgcccaacggcaagaaggccatggccgcgtgcaaggtgcccgtgccgtcgtgctagttaacttctgtttgcgccgccgccgcgtacgtgtcgtgtcgtgcctgtgtcagtagcagcaaggcccactggacagggacagagtatggcgtcactttctgtttccgtacatacgtacctggatcgtgccgtgtatgcgtgttccctggtggtactcgatccgctgcctgttgtgtctaccgagctctttggacagctacgcgtgcgtatgaataaatgatataccagatcgtttgtgctgagaaatcaataaatttataaaacaatgcaaaaaaaaaaaaaaaaa

SEQ ID NO: 10834 - protein, 101 aa, Zea mays
  misc_feature: Ceres CLONE ID no. 1684741
  misc_feature: Ceres CDNA ID no. 35383536
  misc_feature (36)..(101): Pfam Name: Tryp_alpha_amyl PFAM Desc: Protease inhibitor/seed storage/LTP family
  misc_feature: Homolog of GI Number: 50932651 NR Desc: putative lipid transfer protein
  misc_feature: Homolog of GI Number: 7489428 NR Desc: probable lipid transfer protein
  misc_feature: Homolog of GI Number: 50932655 NR Desc: putative lipid transfer protein
  misc_feature: Homolog of GI Number: 9279661 NR Desc: lipid transfer protein
  misc_feature: Homolog of GI Number: 24745959 NR Desc: putative lipid transfer protein
  misc_feature: Homolog of GI Number: 498036 NR Desc: lipid transfer protein
  misc_feature: Homolog of GI Number: 493721 NR Desc: TED4
  misc_feature: Homolog of GI Number: 37535856 NR Desc: putative lipid transfer protein
  misc_feature: Homolog of GI Number: 37535858 NR Desc: putative lipid transfer protein
  misc_feature: Homolog of GI Number: 56713103 NR Desc: type 2 non
MTKPSQVLLAALAAWAVVLLLLCAAAPRGADAATACDATQLTPCAGAIIIGRSPSAACCSRLKEQQPCLCTYARDPNLQRYVNSPNGKKAMAACKVPVPSC

SEQ ID NO: 10835 - DNA, 540 bp, Zea mays
  misc_feature: Ceres CLONE ID no. 1684925
  misc_feature: Ceres CDNA ID no. 29191592
  CDS (279)..(452): REFERENCED BY SEQ ID NO: 10836
aaccaccgcagaggacctgcgctcgccgctatcattcgtttctggacacccttctagccccgccgccaccacaccaccaccaccaatggcaggaatcggatcaaaggccctcgccgtggtcgccgtcctggcggccgtcgtcctctcggtggcctccgcggccgaggcgcccgcgcccagccccgtttccgccgccgccggcgcgtcggcgccgttcgccgcggccctcgtcgcctcctccgccgccttcctcttcgccgccgtccgccactgagccgatggggcccttccaccgccgcctaggtctatttattggagtggtattcagtagtactggtactagggagatttctttgttggtgtcgtgtcgtcgtcgcattttggtcggatctggtgtccttggtgggtggggagggtttgtaccgcgtcgtggtgtcggttgtgtgatctgattctgatccccttgtagatactctgctatctcgccgtgatcgtgagtgatgattccgtctggttgctactgaaaaaaaaaaaaaaaaa

SEQ ID NO: 10836 - protein, 62 aa, Zea mays
  misc_feature: Ceres CLONE ID no. 1684925
  misc_feature: Ceres CDNA ID no. 29191592
  misc_feature: Homolog of GI Number: 539030 NR Desc: cysteine
  misc_feature: Homolog of GI Number: 28912428 NR Desc: serine
  misc_feature: Homolog of GI Number: 49182258 NR Desc: serine/proline
  misc_feature: Homolog of GI Number: 19919 NR Desc: Pistil extensin like protein
  misc_feature: Homolog of GI Number: 539029 NR Desc: cysteine
  misc_feature: Homolog of GI Number: 14253159 NR Desc: VMP3 protein
  misc_feature: Homolog of GI Number: 1345531 NR Desc: extensin
  misc_feature: Homolog of GI Number: 76262500 NR Desc: pherophorin
MAGIGSKALAVVAVLAAVVLSVASAAEAPAPSPVSAAAGASAPFAAALVASSAAFLFAAVRH

SEQ ID NO: 10837 - DNA, 773 bp, Zea mays
  misc_feature: Ceres CLONE ID no. 1685166
  misc_feature: Ceres CDNA ID no. 36706840
  CDS (118)..(570): REFERENCED BY SEQ ID NO: 10838
aaagttgagcagcaactcagcagaagcacaccactacggccggttcgtcgtccctagataagctggtgcgtctcgcggcgtggtggatcggaggagaggtgggacaggcaggcacccatggcggggctacagaggtcggcgaccacgttcagaaggtccgggtcctcgggcctggtctgggacgagcggttcctgaccgaggccgaggccgaggcgaaggcgaaggccggcggtggcgccgccgccgccgaggacccccagccggagctccggcactccaggagcgtcgggagcatcggcatgctgctccgtggtggagacagcgacgacggcaataagaaggcgaaggaggtggagaaggcgcgcggcgggcagcagcagcgggtgttccggaccaaggacgtggcccccgacatggacccgccctcgccgagggtgtccggctgcatcctctgcgccatcctgggcgggggctctggcggcggcaaggcacgccgccggtccaagcccaagcccaagcccaagcctaagcctaagcccaggaaggatgtagcgacgacggcggcgtaggcgcgtagcagcacgtacgtacgtcgcgttgtctttccgctgtaaaaaaacaagtttgggggtcatggttgtgtgagagtgcacatgtttatacatactggtagcggtaggcagcgtcatatgagcttgctactcgatgtaatgtatgtacaccatttttagtcaggttagtttcctctctttaagaaaaaaaaaaaaaaaaa

SEQ ID NO: 10838 - protein, 150 aa, Zea mays
  misc_feature: Ceres CLONE ID no. 1685166
  misc_feature: Ceres CDNA ID no. 36706840
  misc_feature: Homolog of GI Number: 27960757 NR Desc: AP2 domain protein
MAGLQRSATTFRRSGSSGLVWDERFLTEAEAEAKAKAGGGAAAAEDPQPELRHSRSVGSIGMLLRGGDSDDGNKKAKEVEKARGGQQQRVFRTKDVAPDMDPPSPRVSGCILCAILGGGSGGGKARRRSKPKPKPKPKPKPRKDVATTAA

SEQ ID NO: 10839 - DNA, 769 bp, Zea mays
  misc_feature: Ceres CLONE ID no. 1685298
  misc_feature: Ceres CDNA ID no. 36707384
  CDS (157)..(477): REFERENCED BY SEQ ID NO: 10840
aaaaaaaaaaaaaaaaaaaaaaaaaaaatcggcctccatttccactttcgagcgcagaaacgagagggcaggagcagccgcagtcccggcgatcccgccgccggtcgccctcatacttcctcgtcactgccttcgtttctctttccaacaatcaagatgagccgtggcggtagcgcgggtggtggtcaaagttctctgggttacctctttggaagcggtgagccccccaaaccagcagtggcaccagctgtaagtgctccacctgctgctgcaggtgctccacctgctgagaaaccacctgctgcaaagcctgatggcaccagtcagattgctgctggggttaccagccaaaccaataactaccacagggccgacggtcagaacaccggcaacttccttacggaccgcccttcgaccaaggtccacgctgctcctggcggtggctcttccctgggatacctgtttggtggcaactgatgccgctcaccaagctatcaccccccactgtcgccgcatgccttttctgaatcgtgaacagccgttgtcatttcatgtgtacccaaacctcccgtcccgcgtgggcccttaagctgcgtctagatttcagggctaatcgtgtgcctgaaccctcatcataagtcgtctctgtacccagcttctcgtttcgtttgcacccgtgatggtatggtttggttgttgcccactggacctatctattctttgcatttttcctttgaaatgtatccttgcacaaaaaaaaaaaaaaaaa

SEQ ID NO: 10840 - protein, 106 aa, Zea mays; identical to SEQ ID NO: 324
  misc_feature: Ceres CLONE ID no. 1685298
  misc_feature: Ceres CDNA ID no. 36707384
  misc_feature: Homolog of GI Number: 21592628 NR Desc: putative nitrilase
  misc_feature: Homolog of GI Number: 2765837 NR Desc: NAP16kDa protein
  misc_feature: Homolog of GI Number: 21280823 NR Desc: putative nitrilase
  misc_feature: Homolog of GI Number: 21592782 NR Desc: nitrilase associated protein
  misc_feature: Homolog of GI Number: 28827480 NR Desc: putative nitrilase associated protein

SEQ ID NO: 10841 - DNA, 715 bp, Zea mays
  misc_feature: Ceres CLONE ID no. 1685443
  misc_feature: Ceres CDNA ID no. 36707595
  CDS (235)..(531): REFERENCED BY SEQ ID NO: 10842
aacgcgaatcctccaatctgcccttgccgccgccgccgcccgatccaggtctgcagactgctcacttctccccacccaacgcggcggcactcctccctcccccagtgcctgttgtgcgcctgtacttcacaccggcgtcgccccctcctccagagctccccaccggagccaccctcacccgtcacgccctcctccgctgagtgcagcaagtgctgatcagtgggtgggcgggagatggtgctgaggcgggcgataaccgaaagccccaagaaggttgcggggctgaaggatctggtgaacctgccgatccagctgcgagagttcgccggaggccagtcccaaatgtcacatatctccttcttcctccgtgtctggtcgtacatcaaggacaacaaacttcaggacccaacgaataagaacattgtgaagtgtgatgagaagctgaagaccgtattattgggtaggtccaaagtgcaactgtctgaactcccaatgattgttaagctccattttccaaaattaccaaagtagtgacaacatagtattgtatattaaagttctgtgggaacatgataggaaagacagaaccatatatgtattgttttgctgaaatttccattcactgcctgtatgtactggagcgatctatacatcgagcataccgattagattgcttgtcattttgataacaaaaaaaaaaaaaaaaaaaaaaaaa

SEQ ID NO: 10842 - protein, 98 aa, Zea mays
  misc_feature: Ceres CLONE ID no. 1685443
  misc_feature: Ceres CDNA ID no. 36707595
  misc_feature (45)..(94): Pfam Name: SWIB PFAM Desc: SWIB/MDM2 domain
  misc_feature: Homolog of GI Number: 50726534 NR Desc: SWIB complex BAF60b domain
  misc_feature: Homolog of GI Number: 50905011 NR Desc: putative SWIb domain
  misc_feature: Homolog of GI Number: 77555897 NR Desc: SWIB/MDM2 domain
  misc_feature: Homolog of GI Number: 33667910 NR Desc: SWIb domain
MVLRRAITESPKKVAGLKDLVNLPIQLREFAGGQSQMSHISFFLRVWSYIKDNKLQDPTNKNIVKCDEKLKTVLLGRSKVQLSELPMIVKLHFPKLPK

SEQ ID NO: 10843 - DNA, 851 bp, Zea mays
  misc_feature: Ceres CLONE ID no. 1685676
  misc_feature: Ceres CDNA ID no. 36707327
  CDS (287)..(628): REFERENCED BY SEQ ID NO: 10844
aatccccctctgtttctccatgatctgttccttctcctggctgttctccagttgacttgctccatcgcctctccacgactagaggagggaggaggggagctctgatcgattcacccaagatgtctgaggtggtggcgatggcggggcaggcctacatgaagcagctgcaggcccacccgctcagaagatctccggtgtttccaagctccaactcaggaggctcctcctcatcgcgctatatggatttgcatacgcgggaccgtttggacatttcctccacaagctcatggataggtttttcaagggaaagaaaggaaaagaaactacagccaagaaggtcttagtagagcagctgaccgcatctccatggaacaacatgatgtttatgatgtattttggtctggtggttgaagggagaccatttggacaagtaaagaacaaggtgaagaaggattatgcatctgtccaactcacagcttggaggttctggccaattgtaagttggatcaactatgagtacatgccactccagctccgagttcttttccacagctttgtcgcctcctgctgggcggtgtttttgaacctcaaggcagcaagatcgatcgcaaatactaagaaggcatagaggcagctatctataccaggagcggaagtcatgatttgagttgaaaaccagtatatattctagacttccgttgtaacacctgaattcttttccagcaggagaggaaccgagtcgtattgtttgccatgaaaagtttgctccttttcatttccatagctgctgttctctcttcatttcgaaaaaaaatgttgtttgctcgcctcgtcgtaaaaaaaaaaaaaaa

SEQ ID NO: 10844 - protein, 113 aa, Zea mays
  misc_feature: Ceres CLONE ID no. 1685676
  misc_feature: Ceres CDNA ID no. 36707327
  misc_feature (40)..(108): Pfam Name: Mpv17_PMP22 PFAM Desc: Mpv17 / PMP22 family
  misc_feature: Homolog of GI Number: 50948647 NR Desc: putative peroxisomal membrane protein
  misc_feature: Homolog of GI Number: 30682784 NR Desc: peroxisomal membrane protein
  misc_feature: Homolog of GI Number: 50906511 NR Desc: putative peroxisomal membrane protein 22 kDa
  misc_feature: Homolog of GI Number: 27764998 NR Desc: At4g04470
  misc_feature: Homolog of GI Number: 72124564 NR Desc:  similar to Peroxisomal membrane protein 2
  misc_feature: Homolog of GI Number: 34904256 NR Desc: P0452F10.16
  misc_feature: Homolog of GI Number: 50416665 NR Desc: Peroxisomal membrane protein 2
  misc_feature: Homolog of GI Number: 50540200 NR Desc: zgc:92754
  misc_feature: Homolog of GI Number: 57105752 NR Desc:  similar to Peroxisomal membrane protein 2
MDRFFKGKKGKETTAKKVLVEQLTASPWNNMMFMMYFGLVVEGRPFGQVKNKVKKDYASVQLTAWRFWPIVSWINYEYMPLQLRVLFHSFVASCWAVFLNLKAARSIANTKKA

SEQ ID NO: 10845 - DNA, 528 bp, Zea mays
  misc_feature: Ceres CLONE ID no. 1685915
  misc_feature: Ceres CDNA ID no. 36706899
  CDS (2)..(400): REFERENCED BY SEQ ID NO: 10846
aaaggcaatcgacgggagcacagagctagctagccagccagccagcagccagcttgctcgccgcgcccgtccttcttcctcgcctccgttccattccgtcccgccctccaccgccgccgccgcactcagggatggagatgaagaagatcgcctgcgccgtcctcgtcgccgcctcggcggccaccgtggcgctcgccgcggaggctccggctccggcccccaccagcggctcctccgccgtcgcgcccgccgtcggcgccgccctcggggccgccgtcgcctccttcttcgcctactacattcagtgagccggccggggcgcccggaggccgaggaagagacgaaggggagagagagtgacatggctgcgcgcattccgatgcgtgggcatgttttttgattcgacacaccttttgtcctctttttctttgttccctctttctccttaatttaacgaattgatgcatgccgctgatgttcttcccctgagagagggattaacacttgtatcaaaaaaaaaaaaaaaaa

SEQ ID NO: 10846 - protein, 58 aa, Zea mays; identical to SEQ ID NO: 804
  misc_feature: Ceres CLONE ID no. 1685915
  misc_feature: Ceres CDNA ID no. 36706899
  misc_feature: Homolog of GI Number: 20279095 NR Desc: arabinogalactan
  misc_feature: Homolog of GI Number: 60265753 NR Desc: pollen
  misc_feature: Homolog of GI Number: 28416877 NR Desc: At1g35230
  misc_feature: Homolog of GI Number: 57900576 NR Desc: putative receptor protein kinase PERK1
  misc_feature: Homolog of GI Number: 6523547 NR Desc: hydroxyproline
  misc_feature: Homolog of GI Number: 2624970 NR Desc: proline

SEQ ID NO: 10847 - DNA, 887 bp, Zea mays
  misc_feature: Ceres CLONE ID no. 1685999
  misc_feature: Ceres CDNA ID no. 36707597
  CDS (97)..(573): REFERENCED BY SEQ ID NO: 10848
aacacggcttttggcagctacaaaccacccaaaagccacccccagaaaccggcggtccttgggtgttccggatctgagccagcagctgagaagaggatgagcgccgtggccgccatggcgacgtcgtcgctgaaccccaacgcgccgctcttcatcccggcggcgtaccggcaggtggaggaattctcgccagagtggtacgagctcgtcaacaccaccgcctggttccgggaccactggttccgccagcaccagcaccacgaggccgccttcgccgccgccgacgccgagctcgacgtcgccgcgctccttcccgacgactccgtcgacctcctcgacaccgacgacctcttctacgcgcctgacgtccaccacccccacaacgccaagccggcgctgctgcccgggtacgacctcgacatgctcagggcgctgagcctcagctccccccgggccgccgccgcgccgtcgccgtcgccgttgctgcgcgcccagcagcagaggcacgcggacaggccggcgcaccacgccaggggcgccgcgcgccgcgtcatcatccaccagcctcgctagaagcagcctgatcatggcgggctgccgccatggctgttgtgcctagtgtaacctcaagcaagtctagtctgtttctgtctgtgtatacgactaaaaaaacaacagatgggggattcggacgaggcggccagtgctctctcctcatagccagcttctcctgttcaagctcagttcttgttcatccagcagagcacaaaaaaaaacagacaggcggagtgatgtacttactattcctcctcctcctcccatgtccatgttgttgaatatatatatgatggcaagcagcctgatctttccaaaaaaaaaaaaaaaaa

SEQ ID NO: 10848 - protein, 158 aa, Zea mays
  misc_feature: Ceres CLONE ID no. 1685999
  misc_feature: Ceres CDNA ID no. 36707597
  misc_feature: Homolog of GI Number: 21592689 NR Desc: ERD15 protein
  misc_feature: Homolog of GI Number: 20197424 NR Desc: ERD15 protein
  misc_feature: Homolog of GI Number: 8489786 NR Desc: dehydration
  misc_feature: Homolog of GI Number: 33415268 NR Desc: poly
  misc_feature: Homolog of GI Number: 42571167 NR Desc: dehydration
  misc_feature: Homolog of GI Number: 75755868 NR Desc: TO44
  misc_feature: Homolog of GI Number: 56481295 NR Desc: early response to dehydration 15
  misc_feature: Homolog of GI Number: 56481323 NR Desc: early response to dehydration 15
  misc_feature: Homolog of GI Number: 56481331 NR Desc: early response to dehydration 15
  misc_feature: Homolog of GI Number: 67987177 NR Desc: 4Fe
MSAVAAMATSSLNPNAPLFIPAAYRQVEEFSPEWYELVNTTAWFRDHWFRQHQHHEAAFAAADAELDVAALLPDDSVDLLDTDDLFYAPDVHHPHNAKPALLPGYDLDMLRALSLSSPRAAAAPSPSPLLRAQQQRHADRPAHHARGAARRVIIHQPR

SEQ ID NO: 10849 - DNA, 649 bp, Zea mays
  misc_feature: Ceres CLONE ID no. 1686020
  misc_feature: Ceres CDNA ID no. 35383537
  CDS (114)..(314): REFERENCED BY SEQ ID NO: 10850
aaccgtccccgtctcaccgcactgcctgccccctcctctcgtctgcctcgcttagcttagccgccgctgctacgcactctcgccgtccttgttcccgcatcgctctgctcgcgatggcgtcccgcgttgcgctgctgctcgtggccgtggtggccgtgctgttcgccgcggcgtcggcccaggagatggacctgggcgtgccgcccgcgccggcgcccgtcacgggcgcggcagcggggaccgcggcgtcggtcctggccgtggcttgctctgccgtcttctccatcctcgtcgccggtggcctcgtgcagtaggcgctgccgtcgacgtggtggctcgctgctggttcggggtcaggcggagccctgttcgatcgttttcgccttagttagtagtagaagtagcagtcatgggctgtgttgattgtgtccctgtctcccacctggtgggcgttgtgatcttgtgccattgcttattctttttgtaccatactgcattgttcgacgtataccttgtgttgaggcgtgtgttgtatgaataaagacgatggatctcgttcgtcaatcgtcattaggattgctgggttccatgttctgttcatttgcgatagaaatctcccaaaacatatccgcaaaaaaaaaaaaaaaaa

SEQ ID NO: 10850 - protein, 66 aa, Zea mays
  misc_feature: Ceres CLONE ID no. 1686020
  misc_feature: Ceres CDNA ID no. 35383537
MASRVALLLVAVVAVLFAAASAQEMDLGVPPAPAPVTGAAAGTAASVLAVACSAVFSILVAGGLVQ

SEQ ID NO: 10851 - DNA, 625 bp, Zea mays
  misc_feature: Ceres CLONE ID no. 1686028
  misc_feature: Ceres CDNA ID no. 36707135
  CDS (111)..(464): REFERENCED BY SEQ ID NO: 10852
aacggagaaaaagaaagaggagctcggacaaggcagagcgccatcgttcggtttccttgctgaattcccgatcgctcgctcgctcgaaaagaaagaagctagcttttagcatggcgtctctggcgttcggcagcaccgtagcggcggccgtggcggcgacatcggggaggacgcggccggcgcgccggtccgtgctggtcgtgccgcccgctgccagcaggggcggcccggcgccggccaaggaggagaagggcctcggcgagaccatcttcggcttcatcttcaagaaggaccagctggtggagacggacccgctcctcaacaaggtcggcgccgcgccggccgccgcctcccgcgccaagacgaccgccggcaagaaggctgccggcggcgacgacagcggcagcggcggggggttcaacctcggcggcctcggcgggctcttcgccaagaaaagcagctgaacgtggcgttgtttatggattgtcgaactcaaagctggatttggcttttgagggggaaatggttgcgcatatatatttgtggacgtgtggtggtgtgaccagtgatctttgatgtcataatgtgatatactctacttccagctgcaaaaaaaaaaaaaaaa

SEQ ID NO: 10852 - protein, 117 aa, Zea mays; identical to SEQ ID NO: 10114
  misc_feature: Ceres CLONE ID no. 1686028
  misc_feature: Ceres CDNA ID no. 36707135
  misc_feature: Homolog of GI Number: 27529048 NR Desc: thylakoid soluble phosphoprotein

SEQ ID NO: 10853 - DNA, 1128 bp, Zea mays
  misc_feature: Ceres CLONE ID no. 1686381
  misc_feature: Ceres CDNA ID no. 40041564
  CDS (93)..(776): REFERENCED BY SEQ ID NO: 10854
aactccaaccgccgagccagaggcacccggagcagcgcacagcaacagagcacacgccgcacaccgccgccgcctccgcagcagcagcagcaatggcgcgcgccggcgctctctgcctggtgctgctctgcctcgtggccgtgcactcagccacggcgcagaagtccacgacagccccggccgccgcgccggccgccgccaccaccccgccggcgaccccgaccaagaagtcgcccgcgcccgccgccgcgccgcccaccaccccggccaccctggccccggccgccgcgccgcccaccacgccggccacccccgcgcccgccgctgcgccgcccactacccctgccaccctggcacccgccgcggcgccgcccaagtccgcccccaaggcgtcccctcccgccccgtcgcccaaggccaaggccaccccgccggtggccgagctgccgcccgccgcctcgcctcccgcccccgcccccgcctcccctcccaccaagcccgccgaggtccccgcgcccgcgccgtccaagaagaagaagaagccctcctcgtcgtccaagaacaagaagaagaagtccaaggccccggctccagcccccgtcgccgaggcacccaccagcaccaagcgctccaaggctaaggcaccttcggccagcgaagccgacgcacccggcccggtcggcgatggcgtggccgccgacaccgcgggtgctggaaggaccgtggcaggcgtaatcatggcggccgcgctgggcctcgtggccctgctcgcctaggcacgggcgcgcgcgcgagcgggtggcgcctgcacggccgcaccgcacgccgggacggacgacgacaggaattggtgacgcggatgcagccggtgcgcggcgccgcgctgtattcttggccggtgtagttgtagtgcagtgccactcacgttcggtggcgggtggtacgtgcggtgcggacgtaccaccgtcgcctcggattctttctttctcttctctcttcctttttttttgttttgctgtactatattgcgacccccattgagatgctttattttatatatttattttattgccgttgtttgtatggtccccatccatgcacgactttgttcaaaaaaaaaaaaaaaaa

SEQ ID NO: 10854 - protein, 227 aa, Zea mays
  misc_feature: Ceres CLONE ID no. 1686381
  misc_feature: Ceres CDNA ID no. 40041564
  misc_feature: Homolog of GI Number: 6523547 NR Desc: hydroxyproline
  misc_feature: Homolog of GI Number: 76262498 NR Desc: pherophorin
  misc_feature: Homolog of GI Number: 76262500 NR Desc: pherophorin
  misc_feature: Homolog of GI Number: 21322711 NR Desc: pherophorin
  misc_feature: Homolog of GI Number: 10945615 NR Desc: arabinogalactan protein
  misc_feature: Homolog of GI Number: 14253159 NR Desc: VMP3 protein
  misc_feature: Homolog of GI Number: 77556634 NR Desc: retrotransposon protein
MARAGALCLVLLCLVAVHSATAQKSTTAPAAAPAAATTPPATPTKKSPAPAAAPPTTPATLAPAAAPPTTPATPAPAAAPPTTPATLAPAAAPPKSAPKASPPAPSPKAKATPPVAELPPAASPPAPAPASPPTKPAEVPAPAPSKKKKKPSSSSKNKKKKSKAPAPAPVAEAPTSTKRSKAKAPSASEADAPGPVGDGVAADTAGAGRTVAGVIMAAALGLVALLA

SEQ ID NO: 10855 - DNA, 1068 bp, Zea mays
  misc_feature: Ceres CLONE ID no. 1686389
  misc_feature: Ceres CDNA ID no. 40041565
  CDS (151)..(567): REFERENCED BY SEQ ID NO: 10856
agccttcccaatcatgagcaccgcgctcccgagtcctctcgctaaaccctctctgtgaatttcgtgggtgggtcgttggctaccgcgaccgcgtgccatccaatccaaagagaaagaggcgctgcggaggaggatagtagcagctagccaatggcgaagggcgggctgggcaagctgcggtgcatgataaggaggtggcactcgtcgagccgcatcgcgcgcgcgccgccggcggccagccacggcgacgacgacgacggcgccgccgacgcgcgccgcggcggcggtggtggggcgtcgtcgttccacggcgcggacgaggtgcccaagggcctgcacccggtgtacgtgggcaagtcgcggcgccggtacctgatcgccgaggagctcgtgggccacccgctgttccggaccctcgtggaccgcagcggcggaggagcggcggcgggcaccgtggtggtcggctgcgaggtcgtgctgttcgagcacctgctgtggatgctggagaacgcggacccgcagccggagtccctcgacgagctcgtcgactactacgcgtgctgctgaagcgctgctcatcatagccgcggtaaacccgatcattctgcgcgtctcggtcgcttacgggtgtagaagaatcgtcgtggcggcggcggcggcggtgctaatccaagaggccactgcagatttacttggatccgtcgctgttaatttgattgtttattgctgtagtttaccaccgtctatgcatgcagatgcagcccaaggccgccgctgctctttcgtctctccgtcggctcggactggattccgttccatttcctctaatttcttcggtcggtcggtcggtcgtgtaacagacattttttgcattatttttttttcattccattttatcgaattaataattacctcggtcgtgtgtaatagacattcccatctggaatttcctttcgtctttaagattttctggagcctggacgacgtcggtgtccacaaatgtacatttcaatgcaaaagcttatattaattggttgctttaaaaaaaaagaaaaaaaaaaaaaaaaa

SEQ ID NO: 10856 - protein, 138 aa, Zea mays
  misc_feature: Ceres CLONE ID no. 1686389
  misc_feature: Ceres CDNA ID no. 40041565
  misc_feature (106)..(119): Pfam Name: Auxin_inducible PFAM Desc: Auxin responsive protein
  misc_feature: Homolog of GI Number: 50946385 NR Desc: auxin
  misc_feature: Homolog of GI Number: 51090654 NR Desc: auxin
  misc_feature: Homolog of GI Number: 15242071 NR Desc: auxin
MAKGGLGKLRCMIRRWHSSSRIARAPPAASHGDDDDGAADARRGGGGGASSFHGADEVPKGLHPVYVGKSRRRYLIAEELVGHPLFRTLVDRSGGGAAAGTVVVGCEVVLFEHLLWMLENADPQPESLDELVDYYACC

SEQ ID NO: 10857 - DNA, 579 bp, Zea mays
  misc_feature: Ceres CLONE ID no. 1686873
  misc_feature: Ceres CDNA ID no. 35383538
  CDS (57)..(353): REFERENCED BY SEQ ID NO: 10858
aaccaactcgatcggtctgctagtgttggagagaagagaatacactacagtactacatggcgaagcagcagcagcagggcatggcggcagtggcgctggtagtgctggtggtgctggcggcgacggcggccgagacggcgtcggcggcttcgtgcaacgccgggcagctggcggcgtgcgcgccggcgatcactgccggcgcgacgccctccgcgtcgtgctgctccaacctcaaggcgcagcaggggtgcttctgccagttcgtgaagaaccccacctacgggcgctacatcaacagccccaacgcgcgcaaggtcgtcgcctcctgcggcgtctccgtgccgcgctgctagtactagtacgtgtgctgtgcatgcatgtacgtgcgcacgtgggctgatcttcctgcttgtttcgtgtcttgccgcgcgccatcaggtgtttgtgtcacttttctgtttagtctctctacatgtgtactggcctcgtgtaccgctcctctatagtcgtgtcgtgtacgggctaattaatatatatacgacgaataaaggatgagttcggcctaaaaaaaaaaaaaaa

SEQ ID NO: 10858 - protein, 98 aa, Zea mays; identical to SEQ ID NO: 8880
  misc_feature: Ceres CLONE ID no. 1686873
  misc_feature: Ceres CDNA ID no. 35383538
  misc_feature (33)..(98): Pfam Name: Tryp_alpha_amyl PFAM Desc: Protease inhibitor/seed storage/LTP family
  misc_feature: Homolog of GI Number: 37535858 NR Desc: putative lipid transfer protein
  misc_feature: Homolog of GI Number: 1041815 NR Desc: lipid transfer protein
  misc_feature: Homolog of GI Number: 10803445 NR Desc: lipid transfer protein
  misc_feature: Homolog of GI Number: 24158821 NR Desc: Chain A
  misc_feature: Homolog of GI Number: 3372342 NR Desc: 7 kDa lipid transfer protein
  misc_feature: Homolog of GI Number: 18893 NR Desc: aleurone specific protein
  misc_feature: Homolog of GI Number: 56713103 NR Desc: type 2 non
  misc_feature: Homolog of GI Number: 37535838 NR Desc: putative lipid transfer protein
  misc_feature: Homolog of GI Number: 37535844 NR Desc: putative lipid transfer protein
  misc_feature: Homolog of GI Number: 37535842 NR Desc: putative lipid transfer protein

SEQ ID NO: 10859 - DNA, 671 bp, Zea mays
  misc_feature: Ceres CLONE ID no. 1686876
  misc_feature: Ceres CDNA ID no. 36706996
  CDS (89)..(499): REFERENCED BY SEQ ID NO: 10860
aaacgcggcacagagcctcattcatctccattcgaaacaccctcgcacccacactctcccttcgtccccagcctaaatccccgcaacgatggctcgcacgaagcagacggcgcgcaagtccacgggcggcaaggccccgaggaagcagctggcgaccaaggcggcgcgcaagtcggcccctgcgaccggcggcgtgaagaagccgcaccgcttccgcccgggcaccgtggcgctgcgcgagatccgcaagtaccagaagagcacggagctgctcatccgcaagctgcccttccagcgcctggtccgcgagatcgcgcaggacttcaagaccgacctccgcttccagtcctccgccgtcgccgcgctgcaggaggccgccgaggcttacctcgtcggcctgttcgaggacaccaacctctgcgccatccacgccaagcgcgtcaccatcatgcccaaggacatccagctcgcccgccgcatccgcggggagcgcgcctaggcggccggccggccggataggccgtggcgcagtctcttctcggaagtttgtactagtggtcgggtcgtgtggagggagtggtgtactaatcagcaatgtctcaaaccatgtcaacctctttgttgtcatcaatggaaatcgctacttatgtgtgccaaaaaaaaaaaaaaaa

SEQ ID NO: 10860 - protein, 136 aa, Zea mays; identical to SEQ ID NO: 358
  misc_feature: Ceres CLONE ID no. 1686876
  misc_feature: Ceres CDNA ID no. 36706996
  misc_feature (58)..(134): Pfam Name: Histone PFAM Desc: Core histone H2A/H2B/H3/H4
  misc_feature: Homolog of GI Number: 59799581 NR Desc: Histone H3
  misc_feature: Homolog of GI Number: 1362108 NR Desc: histone H3 homolog
  misc_feature: Homolog of GI Number: 55775689 NR Desc: histone 3
  misc_feature: Homolog of GI Number: 50728592 NR Desc:  similar to histone protein Hist2h3c1
  misc_feature: Homolog of GI Number: 166384 NR Desc: histone H3
  misc_feature: Homolog of GI Number: 122083 NR Desc: Histone H3
  misc_feature: Homolog of GI Number: 68362812 NR Desc:  similar to CG31613
  misc_feature: Homolog of GI Number: 74004201 NR Desc:  similar to histone 1
  misc_feature: Homolog of GI Number: 73808028 NR Desc: histone H3
  misc_feature: Homolog of GI Number: 50729226 NR Desc:  similar to histone protein Hist2h3c1

SEQ ID NO: 10861 - DNA, 662 bp, Zea mays
  misc_feature: Ceres CLONE ID no. 1686998
  misc_feature: Ceres CDNA ID no. 35383539
  CDS (258)..(449): REFERENCED BY SEQ ID NO: 10862
agtcgcactcgcacgagggctgattcctttccagctcgcaccgcggttgaacagcgtttcgttgtttcctccccaacttccaacacgcctcgatctagatccactcttcccccttctccttccggtcctccccccgagactattcatataggcgggtaggcgtccgaggcctcgtttgttctcggcttcttgtctccaagggtgctactccgtccgcgcttggtctgctctcgtccttccggaggccgcggcgcaacatggcgaagatcaagccgaaggccttgctcgcgcaaagcaaggtgaagaaggtccccggccaaatcagcgtggccacgatcgtcacctacatgatcctcggcgtcctggtcgtgtcctccgtttacgctgcctacaggtactgctgggcagtcacaggagcagcggaggcagtgggcgcccaggggaactgatcccccttccgactgcgtggctgatctcgctgttgttgtatcatccggttggggtaaaatttttggttgttgctgtctagcaaatggggttcatgggacatggataggttgtatgttgatacggttacaccgtagccgatgatatgtatgttgaatttcttcccttttattatcatttgacgatccgattgcctcaaaaaaaaaaaaaaaaaa

SEQ ID NO: 10862 - protein, 63 aa, Zea mays; identical to SEQ ID NO: 10090
  misc_feature: Ceres CLONE ID no. 1686998
  misc_feature: Ceres CDNA ID no. 35383539

SEQ ID NO: 10863 - DNA, 585 bp, Zea mays
  misc_feature: Ceres CLONE ID no. 1687020
  misc_feature: Ceres CDNA ID no. 35383540
  CDS (59)..(355): REFERENCED BY SEQ ID NO: 10864
aacaccaactcgatcggtctgctagtgttggagagaagagaatacactacagtactacatggcgaagcagcagcagcagggcatggcggcagtggcgctggtagtgctggtggtgctggcggcgacggcggccgagacggcgtcggcggcttcgtgcaacgccgggcagctggcggcgtgcgcgccggcgatcactgccggcgcgacgccctccgcgtcgtgctgctccaacctcaaggcgcagcaggggtgcttctgccagttcgtgaagaaccccacctacgggcgctacatcaacagccccaacgcgcgcaaggtcgtcgcctcctgcggcgtctccgtgccgcgctgctagtactagtacgtgtgctgtgcatgcatgtacgtgcgcacgtgggctgatcttcctgcttgtttcgtgtcttgccgcgcgccatcaggtgtttgtgtcacttttctgtttagtctctctacatgtgtactggcctcgtgtaccgctcctctatagtcgtgtcgtgtacgggctaattaatatatatacgacgaataaaggatgagttcggccactaaaaaaaaaaaaaaaaa

SEQ ID NO: 10864 - protein, 98 aa, Zea mays; identical to SEQ ID NO: 8880
  misc_feature: Ceres CLONE ID no. 1687020
  misc_feature: Ceres CDNA ID no. 35383540
  misc_feature (33)..(98): Pfam Name: Tryp_alpha_amyl PFAM Desc: Protease inhibitor/seed storage/LTP family
  misc_feature: Homolog of GI Number: 37535858 NR Desc: putative lipid transfer protein
  misc_feature: Homolog of GI Number: 1041815 NR Desc: lipid transfer protein
  misc_feature: Homolog of GI Number: 10803445 NR Desc: lipid transfer protein
  misc_feature: Homolog of GI Number: 24158821 NR Desc: Chain A
  misc_feature: Homolog of GI Number: 3372342 NR Desc: 7 kDa lipid transfer protein
  misc_feature: Homolog of GI Number: 18893 NR Desc: aleurone specific protein
  misc_feature: Homolog of GI Number: 56713103 NR Desc: type 2 non
  misc_feature: Homolog of GI Number: 37535838 NR Desc: putative lipid transfer protein
  misc_feature: Homolog of GI Number: 37535844 NR Desc: putative lipid transfer protein
  misc_feature: Homolog of GI Number: 37535842 NR Desc: putative lipid transfer protein

SEQ ID NO: 10865 - DNA, 795 bp, Zea mays
  misc_feature: Ceres CLONE ID no. 1687177
  misc_feature: Ceres CDNA ID no. 36707474
  CDS (46)..(570): REFERENCED BY SEQ ID NO: 10866
aggtaaaccattcccctccgccccacctcttgtccagtgccccaaatgctggcgaccacctgcagccggccgccgtgcccgtgcccgtgcccgtgcgcgcggtcgcggcggctccccgcggcgaccttcggcggcaccagtagcgcgaagcgaagggcgccgaggagagcggcggcggcggtgcggtgcgggctgctgcccgtggacccgtgggcgccgacgatggactcccagagcgtggcgtcgcagctcttcgccgtctcgctcttcccctacctgggattcctctacttcatgaccaggtccaagaccgcgcccgggctcacgctcttcggtttctacttcctcctcgtcttcgtcggcgccaccatacctgctgggatttacgcaaaagttcattatggtacctcactgtccaacgttgactggctgcacgggggcgctgaatcgctgctgactctcaccaacctgtttatcgttttggggctgaggggagccctgaggaagctggaggaagagggcacagacgagagcgtttctgaagcttctcaagaaaaaagttctgtctagatgggttcatcatcagtacccctgaaggtgcactcagtaactaggagtgcgctgtttttcttcttctgcagctcaactagctcgtagtgatgttttgggtgtaaggaaatctggcagatctactctctgcatactatgctgataagaaaacaatgtacaggcatctcctgcaattctgagtagtaccttcagctgttgatagtagcagaaaaaaaaaaaaaaaaa

SEQ ID NO: 10866 - protein, 115 aa, Zea mays
  misc_feature: Ceres CLONE ID no. 1687177
  misc_feature: Ceres CDNA ID no. 36707474
MDSQSVASQLFAVSLFPYLGFLYFMTRSKTAPGLTLFGFYFLLVFVGATIPAGIYAKVHYGTSLSNVDWLHGGAESLLTLTNLFIVLGLRGALRKLEEEGTDESVSEASQEKSSV

SEQ ID NO: 10867 - DNA, 666 bp, Zea mays
  misc_feature: Ceres CLONE ID no. 1687197
  misc_feature: Ceres CDNA ID no. 40041566
  CDS (183)..(479): REFERENCED BY SEQ ID NO: 10868
actccttcgtccgtttcggtccatcatcactctcccagtccccagagagtcccagcacgttcctcggaatcgaattcctattcctttgcgcgctcgtgacagcggtggtagatctgagcttcaccggcacttcacgcgcagtctaaaaccccatcacgttcacgcccagtctgcgcttgcagatgctgttatcgcggtgtatttatttttttgttcttgaaacggtgttgttgtttttttggcaggaacgacgccgaagaaaccgggtacaggggcgtcaactacgccggcgggagaactggcggcggcggcggctacggatacggctacctcgggatggtctacgccggcggcggcgaccagagatggagatcgcactcggcgctgtcactggtttcttcagctatcaccgtcgttgcgctcggatgcttgcatttgttgtaacatgtagacgtgtgattctcagttggaaaagttagcaagatggtggggaagattgtagctggggtagcagtaggaggagcgggggtaggcaggcaacagaaaccctgtgtgaagttgcacatgggtattgggtgggaggatattgccaagccagtcactgtacttcttacaaggagaaatggacgactcattctaactttaaaacaaaaaaaaaaaaaaaaa

SEQ ID NO: 10868 - protein, 98 aa, Zea mays
  misc_feature: Ceres CLONE ID no. 1687197
  misc_feature: Ceres CDNA ID no. 40041566
MLLSRCIYFFVLETVLLFFWQERRRRNRVQGRQLRRRENWRRRRLRIRLPRDGLRRRRRPEMEIALGAVTGFFSYHRRCARMLAFVVTCRRVILSWKS

SEQ ID NO: 10869 - DNA, 662 bp, Zea mays
  misc_feature: Ceres CLONE ID no. 1687226
  misc_feature: Ceres CDNA ID no. 36707602
  CDS (109)..(462): REFERENCED BY SEQ ID NO: 10870
accctagaaaaaaagccacctacaccaccaccccgccggccacactcgtctttctcacgagccacaggcacaggcaggctctcgagctcagtccacccatcgcaggggatggcgtcgtcgttcgccgtggcaacggtcccgtcgctggcggccccggcggccaagaagcggtccggcggcgtcacgtacgtggagggcatgaacgcctacagcggcctcaaggggctcaacaaggtgaacatgctcggggtgcgcaagaccgccgactactccttcgccaaggtcgtggcgtcgctcagccccgcgggcaggaagcggcgcggcggcgcgttcggcgcccagatgaacgccgccgccgagatcttcaggatcgccgccaccatgaacggcctcgtgctcgtcggcgtcgccgtcgggttcgtgctgctccgggtggaggccgccgtcgaggagtccgagtagggtgcgtgggcctgccactgtcggctgtcgccccgggccgcagtctgcttcagaaaccgtgatatatataaccagatgtacgctttcgattcaatttactttggtatgtatccatgacaattggtgaatactgtggaaatatgtttttggagtcgaggcctgcaattgatcttcaggtgatctaaaaaaaaaaaaaaaaa

SEQ ID NO: 10870 - protein, 87 aa, Zea mays
  misc_feature: Ceres CLONE ID no. 1687226
  misc_feature: Ceres CDNA ID no. 36707602
  misc_feature (49)..(85): Pfam Name: PetM PFAM Desc: PetM family of cytochrome b6f complex subunit 7
  misc_feature: Homolog of GI Number: 3090403 NR Desc: cytochrome b6f complex subunit
  misc_feature: Homolog of GI Number: 51316199 NR Desc: Cytochrome b6
MNAYSGLKGLNKVNMLGVRKTADYSFAKVVASLSPAGRKRRGGAFGAQMNAAAEIFRIAATMNGLVLVGVAVGFVLLRVEAAVEESE

SEQ ID NO: 10871 - DNA, 513 bp, Zea mays
  misc_feature: Ceres CLONE ID no. 1687359
  misc_feature: Ceres CDNA ID no. 29191797
  CDS (126)..(275): REFERENCED BY SEQ ID NO: 10872
agagagaagcacatacgctaacacagtctccagccagacatccaccgtcctctcctctcctctcctcatctgttgtacgtgtcggccggcaggggcgcgcggctgctgaggtaagtagtagcgcgatgggcaaggtgtgctgcagcaaggaggcgcaggaggaggccgggatcgacctccttgggctgctggtcgccgccaccatcgccctcgtcctcatgctcctctgcacgccgccccggaggcgctgcgtcgccgtctacccgtgctgctgagtgctgactgctgactgctcagcggcgctcaagcctctctctgtctgtatcgatcgcatgcatgcagcagagcagtgcagaccaggcagcaggctgcaggcattggctcctcatcttttttggttcaccaaataatttcgactcggctgtaataatacccatcctactgcaagtcatgtactaaaatatatccatcctaatgcaaagccatctctagcctgaaaaaaaaaaaaaaaaa

SEQ ID NO: 10872 - protein, 49 aa, Zea mays
  misc_feature: Ceres CLONE ID no. 1687359
  misc_feature: Ceres CDNA ID no. 29191797
MGKVCCSKEAQEEAGIDLLGLLVAATIALVLMLLCTPPRRRCVAVYPCC

SEQ ID NO: 10873 - DNA, 723 bp, Zea mays
  misc_feature: Ceres CLONE ID no. 1687575
  misc_feature: Ceres CDNA ID no. 36707603
  CDS (61)..(516): REFERENCED BY SEQ ID NO: 10874
aaccccaaatcctagggttctagtcgcttctcgtcgtttcgttcgtagatcacagcgacaatggtgaaggcagttgctgtcctcgccggcactgatgtcaagggcaccatcttcttttcacaggagggggatggtccgaccaccgtgactggaagtatctctggcctcaagccagggctccatgggttccatgtgcacgcgcttggcgacaccaccaacggctgcatgtcgactgggccacacttcaatcctgttggcaaggagcatggcgcaccggaagatgaggaccgccatgccggtgatcttgggaatgtgacagcgggagaagatggtgttgttaatgtcaatattactgacagccagatacctcttgctggaccccactcgatcattggccgagctgttgttgtccatgctgatccggatgaccttggcaaaggtggacatgagcttagcaagagcaccggaaatgctggcggacgtgttgcctgtggtatcattgggctccaaggctaaagcggttaacctccgaggcaaacaccatagaaggtcgaagcgagcacctcaggaagttgctgttccatttcccctgtattggcaacacaatttgagtactccaaataagcgcctgatccatgatcagagagcactattcatgtcattttgtatatgaacaatgttgcgcacctgcttaagtgtctgttccaaaaaaaaaaaaaaaaa

SEQ ID NO: 10874 - protein, 151 aa, Zea mays
  misc_feature: Ceres CLONE ID no. 1687575
  misc_feature: Ceres CDNA ID no. 36707603
  misc_feature (1)..(151): Pfam Name: Sod_Cu PFAM Desc: Copper/zinc superoxide dismutase
  misc_feature: Homolog of GI Number: 134613 NR Desc: Superoxide dismutase
  misc_feature: Homolog of GI Number: 134596 NR Desc: Superoxide dismutase
  misc_feature: Homolog of GI Number: 6018682 NR Desc: superoxide dismutase
  misc_feature: Homolog of GI Number: 134598 NR Desc: Superoxide dismutase
  misc_feature: Homolog of GI Number: 7433301 NR Desc: superoxide dismutase
  misc_feature: Homolog of GI Number: 6273423 NR Desc: copper/zinc
  misc_feature: Homolog of GI Number: 19172405 NR Desc: copper/zinc superoxide dismutase
  misc_feature: Homolog of GI Number: 134595 NR Desc: Superoxide dismutase
  misc_feature: Homolog of GI Number: 6018746 NR Desc: superoxide dismutase
  misc_feature: Homolog of GI Number: 538430 NR Desc: superoxide dismutase
MVKAVAVLAGTDVKGTIFFSQEGDGPTTVTGSISGLKPGLHGFHVHALGDTTNGCMSTGPHFNPVGKEHGAPEDEDRHAGDLGNVTAGEDGVVNVNITDSQIPLAGPHSIIGRAVVVHADPDDLGKGGHELSKSTGNAGGRVACGIIGLQG

SEQ ID NO: 10875 - DNA, 571 bp, Zea mays
  misc_feature: Ceres CLONE ID no. 1687661
  misc_feature: Ceres CDNA ID no. 35393730
  CDS (38)..(355): REFERENCED BY SEQ ID NO: 10876
aacaacactgaacacccctgcttacgttacgatcaacatggcctcgagaaccaccgcgtcctccctcgctctcctgctgctcctttcctgcgccgccgtgagcagcgcggcgcgaaggctggaggaggtggcgacgcccaaggagggggagccccacctgaccgtgccggacctgccagtgccagagcacgacttgccgccgctgcccaaggtcgagatgccgccgttcccggaggtcgagctgccaccgctgcccaaggtcgaaatgccgccgttcccggaggtcgagctgccgccgaagcccgagttaccggccattcccggattccatttcccggagcctactacgccatgacgcgccgccacccctgcgtgctacttcctcggtcgtacgcgcgcgcgcgcgcgaattatatatgtgttcgtgttgggatatggatgcccgctcgtgtcgtgactcgtgagtgtgtgctctgcttgcgttcgtgcttgatgtattatatatacaaataaactttattttctgacttatattaaaaaaaaaaaaaaaaaaaaaaaaaaaaaaaaaaaa

SEQ ID NO: 10876 - protein, 105 aa, Zea mays
  misc_feature: Ceres CLONE ID no. 1687661
  misc_feature: Ceres CDNA ID no. 35393730
  misc_feature: Homolog of GI Number: 50939009 NR Desc: early nodulin 75 precursor
  misc_feature: Homolog of GI Number: 50939013 NR Desc: proline
  misc_feature: Homolog of GI Number: 7671437 NR Desc: putative proline
  misc_feature: Homolog of GI Number: 15451136 NR Desc: periaxin
  misc_feature: Homolog of GI Number: 7671436 NR Desc: periaxin
  misc_feature: Homolog of GI Number: 10047317 NR Desc: KIAA1620 protein
  misc_feature: Homolog of GI Number: 32490589 NR Desc: periaxin
  misc_feature: Homolog of GI Number: 50939019 NR Desc: vegetative cell wall protein gp1 precursor
  misc_feature: Homolog of GI Number: 51963522 NR Desc: PREDICTED OJ1634_B10.112 gene product
  misc_feature: Homolog of GI Number: 45768352 NR Desc: Prx protein
MASRTTASSLALLLLLSCAAVSSAARRLEEVATPKEGEPHLTVPDLPVPEHDLPPLPKVEMPPFPEVELPPLPKVEMPPFPEVELPPKPELPAIPGFHFPEPTTP

SEQ ID NO: 10877 - DNA, 541 bp, Zea mays
  misc_feature: Ceres CLONE ID no. 1688128
  misc_feature: Ceres CDNA ID no. 36707604
  CDS (36)..(344): REFERENCED BY SEQ ID NO: 10878
aagaatgatttctttctattacaacgtggaagcgtatgataatatgtttgaggatgctaggtgatgtatttcagaagttagagatgatggacaaatatgaaaagttaaaaaagaaataccgaccaccgaaatgggaatatcgacacatcaaaggcaagcgcataagaatcagagtttatcctgacagtaatcctgaagtggcggcaaaaggagatcccgacactgatgagctcgaagagttagaaagcacacaccttaataacgaattggatgaagcagcaagctcaggcctcgacaggagtgtattggacgatgcagcttctggagaccttgaatatatgtagatcagagcttccatttggtacttttttgtgcctgcttaaccaaagcggtctagagcaaattgaactggtaacatactctctgttttgatttgacatcctagaacccgtgtcgtcatactgccaagacatgggcatcgctatcttctgaagtatttttactacctaaaaaaaaaaaaaaagaaaaaaaaaaaaaaaaa

SEQ ID NO: 10878 - protein, 102 aa, Zea mays
  misc_feature: Ceres CLONE ID no. 1688128
  misc_feature: Ceres CDNA ID no. 36707604
MIICLRMLGDVFQKLEMMDKYEKLKKKYRPPKWEYRHIKGKRIRIRVYPDSNPEVAAKGDPDTDELEELESTHLNNELDEAASSGLDRSVLDDAASGDLEYM

SEQ ID NO: 10879 - DNA, 583 bp, Zea mays
  misc_feature: Ceres CLONE ID no. 1688144
  misc_feature: Ceres CDNA ID no. 36706900
  CDS (45)..(431): REFERENCED BY SEQ ID NO: 10880
aacacactgcacgcagctagctaggagcagcagcagcggcggcgatggcggcctccatgatctcctcgtcagctctggcggtggcgcctcagggcctgccgcccctcggccgccgcgcctcctccttcgccgtcgtctgctccaagaagaagatcaagaccgacaagccctacgggattgggggtggcctgaccgtcgacgtcgacgccaacgggagaaagggcaagggcaagggcgtgtaccagttcgtcgacaagtacggcgcgaacgtcgacggatacagcccaatctacaacgaggatgactggtctcccaccggcgacgtctacgtcggtggaaccactgggcttctgatctgggccgtcaccctcgctgggatcctcggcggcggcgccctcctcgtctacaacaccagcgccctctccggctaaggatatccaatgcatgcgcttcttgcgattcgtcatgtaaaatcagggtgtctgtctataatctagcctccatggatgctcaaccttcgtcatgtaacaataatcagtgctactcttcattaaaaaaaaaaaaagaaaaaaaaaaaaaaaaa

SEQ ID NO: 10880 - protein, 124 aa, Zea mays; identical to SEQ ID NO: 9358
  misc_feature: Ceres CLONE ID no. 1688144
  misc_feature: Ceres CDNA ID no. 36706900
  misc_feature (29)..(124): Pfam Name: PsbR PFAM Desc: Photosystem II 10 kDa polypeptide PsbR
  misc_feature: Homolog of GI Number: 50942069 NR Desc: putative photosystem II 10K protein
  misc_feature: Homolog of GI Number: 1835731 NR Desc: photosystem II 10 kDa polypeptide
  misc_feature: Homolog of GI Number: 83776786 NR Desc: chloroplast photosystem II 10 kDa protein
  misc_feature: Homolog of GI Number: 22669 NR Desc: NtpII10
  misc_feature: Homolog of GI Number: 1217642 NR Desc: PSII polypeptide
  misc_feature: Homolog of GI Number: 21489 NR Desc: ST
  misc_feature: Homolog of GI Number: 25989650 NR Desc: photosystem II 10 kDa protein
  misc_feature: Homolog of GI Number: 81471 NR Desc: photosystem II 10K protein precursor
  misc_feature: Homolog of GI Number: 1418984 NR Desc: photosystem II 10 kD polypeptide
  misc_feature: Homolog of GI Number: 33694227 NR Desc: 10 kDa photosystem II polypeptide

SEQ ID NO: 10881 - DNA, 612 bp, Zea mays
  misc_feature: Ceres CLONE ID no. 1688345
  misc_feature: Ceres CDNA ID no. 40041567
  CDS (258)..(422): REFERENCED BY SEQ ID NO: 10882
agagctcgctcgtatctcctctctggacgaacagatcctctctggacgaacagaaaggttaccagcagcaccacggcgagatctccccttggcgggccaaaaccgacggcgagcttcaccggcgttggtcggctccaatctcttcgccgttttattttcctcccagatccggcggtgaccgtgctcctgttcgttcttctggtcttgattcgattgggaggggaaggggttccttcggtcttgggaaattcgaagacatgcctgcgctctacgcttacggagatggcgggtggccgtggtggtcatggcggcgtgtggtcgtcgtcgtcccggcgcgcccgccgcccttgcaccaccgtcgccgtgcagactgcggagggccttggtttgtggggcgggtaggggagtcgtgctgctgctgacctttttggttggggtaaacctgtccgatcaactgacaactgctgacagcacaataaaagacgttaatatttcaaataacccctaaatgacattttgtctgtaagtcaatggcgtattgactatttactaagcttgttctcgtaatgacatttaagcgaattctaagtttcataaaaaaaaaaaaaaaaa

SEQ ID NO: 10882 - protein, 67 aa, Zea mays
  misc_feature: Ceres CLONE ID no. 1688345
  misc_feature: Ceres CDNA ID no. 40041567
MAACGRRRPGAPAALAPPSPCRLRRALVCGAGRGVVLLLTFLVGVNLSDQLTTADSTIKDVNISNNP

SEQ ID NO: 10883 - DNA, 539 bp, Zea mays
  misc_feature: Ceres CLONE ID no. 1688642
  misc_feature: Ceres CDNA ID no. 35383541
  CDS (15)..(269): REFERENCED BY SEQ ID NO: 10884
agcatattctcgcgatgggagcggaggaagcagagggtactcccccgccgctgcccgccaccggcgagcccgcaaccacggcaagggcgcagccaatatctgcagcacaattcctctcctggaagcagcgcaaggatgcagaggtagccgtaaggaaagctgaagcagctcagaagcgagctgatgatatcgcttcgggagcggtgcagatgaacggccgcgagctgttccaacaagagccctgggtgtttgacaaccacatttactgagatcgtgtcgggctactgttcctgcattagtccaagctccagcggtggtttcattttgtactgctatatcagctttgcggaactgtggattttatttcaccgtttataagattattctctcaataggtatttgaacttgtttcaaatacgttttgccaaatctttgtgcagtcaccgaatgatatctagtgtcgctattctttttctaaaactcttacaaacaaagagtattggtcggaagagaaaaaaaaaaaaaaaaaaaaaaaaaaa

SEQ ID NO: 10884 - protein, 84 aa, Zea mays; identical to SEQ ID NO: 450
  misc_feature: Ceres CLONE ID no. 1688642
  misc_feature: Ceres CDNA ID no. 35383541
  misc_feature: Homolog of GI Number: 9280685 NR Desc: F2E2.21

SEQ ID NO: 10885 - DNA, 839 bp, Zea mays
  misc_feature: Ceres CLONE ID no. 1688709
  misc_feature: Ceres CDNA ID no. 35383542
  CDS (100)..(642): REFERENCED BY SEQ ID NO: 10886
aatccctcggctgcagagtcgacctcatccaagttccatttattattttctccgaggaagccctttccccaggcacagatccggctcctcgccgccgccatggccgcccgcctccccctcctggtcctcgccgttgtcgctgcgtccctcctcgctgccgacgcgcggccgtgccacaccttcttcgtcgccttccgcgccgaccccaaccccagcagaggcgacgacgctgtaccccaccacctcggcgccccgcatgtcgctacagtcatcaccgtcttccgtgtccgccgtctcggtccgcacgtcccccacggccaccgtaaccaccaccacctccactccatccccgccaacgtccggatccaccgccccgatctcccgcaccccgccgcggggccccaggagcgcgccagggacatcttcgtggtcgtcatcgggctcctctttggcgtcgcctgcggagcgctcaccgctgcttccgtgtacctcgtctggtccatggtcgccggagctgctgcggtctccgcgtacgacgagctctacgacgacgaggacgaggcgtccgacatcgagagccccaagaaggtcggctacgtcatcatccaggagctcgaggtcgatgaaggcggtaagaactagggccggatttggtggcgctcgtgctcccgggaggtagggcaagttcctgaagtgggttggcctatggccatatgttgagtgaatcgtaatgtctgtatgacaatgtgatgcgcagttgggacttgggagccttaggggtttgccctccatgtgaatatgatcgtgaagcatgcttaagcgaaaaaaaaaaaaaaaaa

SEQ ID NO: 10886 - protein, 180 aa, Zea mays
  misc_feature: Ceres CLONE ID no. 1688709
  misc_feature: Ceres CDNA ID no. 35383542
  misc_feature: Homolog of GI Number: 15809746 NR Desc: At1g65720/F1E22_13
  misc_feature: Homolog of GI Number: 188864 NR Desc: mucin
  misc_feature: Homolog of GI Number: 55235760 NR Desc: ENSANGP00000020885
  misc_feature: Homolog of GI Number: 5420387 NR Desc: proteophosphoglycan
  misc_feature: Homolog of GI Number: 11359723 NR Desc: proteophosphoglycan
  misc_feature: Homolog of GI Number: 186396 NR Desc: mucin
  misc_feature: Homolog of GI Number: 72547041 NR Desc: proteophosphoglycan ppg1
  misc_feature: Homolog of GI Number: 72547018 NR Desc: proteophosphoglycan ppg3
  misc_feature: Homolog of GI Number: 34809533 NR Desc: Epa5p
MAARLPLLVLAVVAASLLAADARPCHTFFVAFRADPNPSRGDDAVPHHLGAPHVATVITVFRVRRLGPHVPHGHRNHHHLHSIPANVRIHRPDLPHPAAGPQERARDIFVVVIGLLFGVACGALTAASVYLVWSMVAGAAAVSAYDELYDDEDEASDIESPKKVGYVIIQELEVDEGGKN

SEQ ID NO: 10887 - DNA, 599 bp, Zea mays
  misc_feature: Ceres CLONE ID no. 1689413
  misc_feature: Ceres CDNA ID no. 36706901
  CDS (72)..(440): REFERENCED BY SEQ ID NO: 10888
aaccaaaggtaccttgcaatcacaacgaacagaagctctcgatctcaccgacaccgaggaagaagagatcaatggcgtccgagcagggagtcgtgatcgcgtgccacagcaaggctgagttcgacgcccacatgaccaaggcccaggaagccggcaagctggtggtcatcgacttcactgccgcctggtgcggtccatgccgcgccatcgccccactgttcgtcgaacacgccaagaagttcactcaggtcgtcttcctgaaggtggacgtggacgaagtgaaggaagtcaccgcggcctacgaggtcgaggcgatgccgaccttccacttcgtcaagaacggcaagacggtcgcgaccatcgtgggtgccaggaaggacgagctcctggcccagatcgagaagcatgccgcgcctgcgcctgcgtctgcgtctgcctaaaggagatcagtcgtcgccgtcaataagggccagcacgtatggctgtaaatgttgtcgttatcagttctggctttgtcgtttgtgggcgattgtgaactagtagtatgtttgtttctatccgagccggaggcgatacttaaccaaaaaaaaaaaaaaaaa

SEQ ID NO: 10888 - protein, 122 aa, Zea mays; identical to SEQ ID NO: 1072
  misc_feature: Ceres CLONE ID no. 1689413
  misc_feature: Ceres CDNA ID no. 36706901
  misc_feature (8)..(114): Pfam Name: Thioredoxin PFAM Desc: Thioredoxin
  misc_feature: Homolog of GI Number: 66841004 NR Desc: thioredoxin h2 protein
  misc_feature: Homolog of GI Number: 82407383 NR Desc: Chain A
  misc_feature: Homolog of GI Number: 50934769 NR Desc: Thioredoxin H
  misc_feature: Homolog of GI Number: 27461140 NR Desc: thioredoxin H
  misc_feature: Homolog of GI Number: 32186040 NR Desc: thioredoxin h isoform 1
  misc_feature: Homolog of GI Number: 20047 NR Desc: thioredoxin
  misc_feature: Homolog of GI Number: 53748515 NR Desc: thioredoxin 1
  misc_feature: Homolog of GI Number: 40287476 NR Desc: thioredoxin
  misc_feature: Homolog of GI Number: 55670844 NR Desc: Chain A
  misc_feature: Homolog of GI Number: 21617958 NR Desc: thioredoxin h

SEQ ID NO: 10889 - DNA, 566 bp, Zea mays
  misc_feature: Ceres CLONE ID no. 1689429
  misc_feature: Ceres CDNA ID no. 35383543
  CDS (2)..(451): REFERENCED BY SEQ ID NO: 10890
aaggtgtgtgtttgattccgaggcggggatgacgagcccaatggtggccaccccggtccagttccacacaaccggccgcctcagcttctgctccttttcctttcccagcgcatcagggaggcggcgattcgcggcggtgagggcgtccgcggagacgatggcgacggagaagctgggcatcaaggtggagcgcaacccgcccgagtcccgcctctccgagctcggcgtccgccagtggcccaagtgggggtgcgagaagagcaagttcccgtggacctactccgccaaggagacgtgctacctgctgcaggggaaggtgaaggtgtaccccgaaggccacggggaggagttcgtggagatcggcgcgggagaccttgtcgtcttccccaagggcatgagctgcacctgggacgtcgccgaggccgtcgacaagcactacaacttcgagtagccgccgccgccgactagccctgcggcgctcgatgtagacttgctgtgctcttgtactctgaaccaccgtgtaataaagctccggattagggtactactaaaaaaaaaaaaaaaaa

SEQ ID NO: 10890 - protein, 140 aa, Zea mays; identical to SEQ ID NO: 9478
  misc_feature: Ceres CLONE ID no. 1689429
  misc_feature: Ceres CDNA ID no. 35383543
  misc_feature: Homolog of GI Number: 50924572 NR Desc: OSJNBa0027P08.10
  misc_feature: Homolog of GI Number: 50926366 NR Desc: OSJNBb0065L13.6

SEQ ID NO: 10891 - DNA, 685 bp, Zea mays
  misc_feature: Ceres CLONE ID no. 1689639
  misc_feature: Ceres CDNA ID no. 36707610
  CDS (3)..(242): REFERENCED BY SEQ ID NO: 10892
aaatctctggttccgctttcgttttttgcatacctaaccaacctctgcatctgcttcaggttcgtacttttgaggcgcaatgtgggtcgttggcgcagtatgggatgaagcacatgcggtccttcgcaaacatctgcaacgctggcatccttcctgaagcagtgtcgaaggtcgctgctcaggcttgcaccagcattccttccaacccctggagttctatccacaagggttttagcgcctaagaatcataaggtgaggcgaaatatttcagccgctccaccgcaacgaactggtttacattaccagtcctcaggggggtcctagttcttgaaccataggtgaagcagacttataccactattatagctgttccaccgtcgttccagattacatagctatgcccaatttccggtgtacatatatagtcggaaagttatttggcaattgcattggtcgttgctgtatatattccctatagtttgttagcagatgtgtagtttgtaattccataaaaatgaaggacgcgttactgctatttctatgtagccgactggtgctcatgtgaaactttaccccattcttgttgggaaatgtactatccgtggtggaattcttgcatcgaaaacaattcccgggtgatcctttattcaaggtgaaccgtctgtcctaaaaaaaaaaaaaaaaa

SEQ ID NO: 10892 - protein, 45 aa, Zea mays
  misc_feature: Ceres CLONE ID no. 1689639
  misc_feature: Ceres CDNA ID no. 36707610
  misc_feature (1)..(29): Pfam Name: Peptidase_C13 PFAM Desc: Peptidase C13 family
  misc_feature: Homolog of GI Number: 6634705 NR Desc: legumain
  misc_feature: Homolog of GI Number: 4154281 NR Desc: C13 endopeptidase NP1 precursor
  misc_feature: Homolog of GI Number: 11558854 NR Desc: putative legumain
  misc_feature: Homolog of GI Number: 6634703 NR Desc: legumain
  misc_feature: Homolog of GI Number: 11558852 NR Desc: putative legumain
  misc_feature: Homolog of GI Number: 34914086 NR Desc: asparaginyl endopeptidase
  misc_feature: Homolog of GI Number: 53748429 NR Desc: endopeptidase 1
  misc_feature: Homolog of GI Number: 37542692 NR Desc: vacuolar processing enzyme 2
  misc_feature: Homolog of GI Number: 27544008 NR Desc: vacuolar processing enzyme
  misc_feature: Homolog of GI Number: 510358 NR Desc: cysteine proteinase
MKHMRSFANICNAGILPEAVSKVAAQACTSIPSNPWSSIHKGFSA

SEQ ID NO: 10893 - DNA, 642 bp, Zea mays
  misc_feature: Ceres CLONE ID no. 1689730
  misc_feature: Ceres CDNA ID no. 36706843
  CDS (322)..(534): REFERENCED BY SEQ ID NO: 10894
atatttttctagatttgtactaagatgatccttgtacatattttcctccatgtgtgaatattcccggatggctgttggagggaggggaggcagggaaaggttgatttgttgtggggtttcagatgatggcatgccagtggggaggtagaagggatggccagtaaaacacaaaaggatcaaaggagacatggtatgcgaccagaccatgcatgaggtgtctagatgtacatagcgtctgtgtagtgtacctgtgtgttgtgtgtgtgtggaggtagagcgtggagaggcgaccatgtcggcgatccaagactggaagtaaagatgactggatttttttctatggccgcactgcaccggcggcggctcccggtgacgtttccggcaagaaggcctggagcggttccagaacaacatcatcgtctcgactctcgagtacttgtcattccaccgttcattctgttatttattatctggtattactgctctgtaattttctcaatgtatttccttattgatctcatatgctctagctaggggccgggagcatctatgtaccttgtactactatgtgctactgtttctgctgataaggaaataataattaagaccggccttgttaattaagaaaaaaaaaaaaaaaaa

SEQ ID NO: 10894 - protein, 70 aa, Zea mays
  misc_feature: Ceres CLONE ID no. 1689730
  misc_feature: Ceres CDNA ID no. 36706843
MTGFFSMAALHRRRLPVTFPARRPGAVPEQHHRLDSRVLVIPPFILLFIIWYYCSVIFSMYFLIDLICSS

SEQ ID NO: 10895 - DNA, 670 bp, Zea mays
  misc_feature: Ceres CLONE ID no. 1689737
  misc_feature: Ceres CDNA ID no. 36706844
  CDS (77)..(526): REFERENCED BY SEQ ID NO: 10896
agtatcccccgcaccttttaactcgttctccacccccagtcctaccactttctctcctttccaccccaaacacaccatggccgaccaactgtctgaggagcagatttctgagttcaaggaggcgttctcgctattcgacaaggacggcgatggcacgatcaccacgaaggagctcggcacggtgatgcgctcgctcgggcagaacccgacggaggcggagctgcaggacatgatcaacgaggtcgacgcggacgggaacgggacgatcgacttccccgagttcctgacgatgatggcgcgcaagatgcgcgacaccgacagcgaggaggagatcaaggaggcgttcaaggtgttcgacaaggacgggaacggctacatctccgccgcggagctgcggcacgtcatgaccaacctcggcgagaagctctcggactccgaggtcgacgagatgattcgcgaagccgacgtcgacggcgatggccagatcaactacgaggagttcgtcaagatgatgctttcgaagtaaaggactgggccctatgtgccattctaccgcgtcgttttcgtctgtacggtatctattcccagcccatggtatgcctgcgtatacgagtagtgaagtattccaacaatgcaaagtccattagttcgccaaaaaaaaaaaaaaaaa

SEQ ID NO: 10896 - protein, 149 aa, Zea mays
  misc_feature: Ceres CLONE ID no. 1689737
  misc_feature: Ceres CDNA ID no. 36706844
  misc_feature (85)..(113): Pfam Name: efhand PFAM Desc: EF hand
  misc_feature: Homolog of GI Number: 20137620 NR Desc: Calmodulin
  misc_feature: Homolog of GI Number: 115521 NR Desc: Calmodulin
  misc_feature: Homolog of GI Number: 50980796 NR Desc: calmodulin
  misc_feature: Homolog of GI Number: 62901496 NR Desc: Calmodulin
  misc_feature: Homolog of GI Number: 46099694 NR Desc: CLM_PLEOS Calmodulin
  misc_feature: Homolog of GI Number: 46517823 NR Desc: calmodulin
  misc_feature: Homolog of GI Number: 115519 NR Desc: Calmodulin
  misc_feature: Homolog of GI Number: 50748592 NR Desc:  similar to calmodulin 1
  misc_feature: Homolog of GI Number: 50980990 NR Desc: calmodulin
  misc_feature: Homolog of GI Number: 49066052 NR Desc: Calmodulin
MADQLSEEQISEFKEAFSLFDKDGDGTITTKELGTVMRSLGQNPTEAELQDMINEVDADGNGTIDFPEFLTMMARKMRDTDSEEEIKEAFKVFDKDGNGYISAAELRHVMTNLGEKLSDSEVDEMIREADVDGDGQINYEEFVKMMLSK

SEQ ID NO: 10897 - DNA, 535 bp, Zea mays
  misc_feature: Ceres CLONE ID no. 1689739
  misc_feature: Ceres CDNA ID no. 35383544
  CDS (12)..(308): REFERENCED BY SEQ ID NO: 10898
aacagtactacatggcgaagcagcagcagcagggcatggcggcagtggcgctggtagtgctggtggtgctggcggcgacggcggccgagacggcgtcggcggcttcgtgcaacgccgggcagctggcggcgtgcgcgccggcgatcactgccggcgcgacgccctccgcgtcgtgctgctccaacctcaaggcgcagcaggggtgcttctgccagttcgtgaagaaccccacctacgggcgctacatcaacagccccaacgcgcgcaaggtcgtcgcctcctgcggcgtctccgtgccgcgctgctagtactagtacgtgtgctgtgcatgcatgtacgtgcgcacgtgggctgatcttcctgcttgtttcgtgtcttgccgcgcgccatcaggtgtttgtgtcacttttctgtttagtctctctacatgtgtactggcctcgtgtaccgctcctctatagtcgtgtcgtgtacgggctaattaatatatatacgacgaataaaggatgagttcggccaaaaaaaaaaaaaaaaa

SEQ ID NO: 10898 - protein, 98 aa, Zea mays; identical to SEQ ID NO: 8880
  misc_feature: Ceres CLONE ID no. 1689739
  misc_feature: Ceres CDNA ID no. 35383544
  misc_feature (33)..(98): Pfam Name: Tryp_alpha_amyl PFAM Desc: Protease inhibitor/seed storage/LTP family
  misc_feature: Homolog of GI Number: 37535858 NR Desc: putative lipid transfer protein
  misc_feature: Homolog of GI Number: 1041815 NR Desc: lipid transfer protein
  misc_feature: Homolog of GI Number: 10803445 NR Desc: lipid transfer protein
  misc_feature: Homolog of GI Number: 24158821 NR Desc: Chain A
  misc_feature: Homolog of GI Number: 3372342 NR Desc: 7 kDa lipid transfer protein
  misc_feature: Homolog of GI Number: 18893 NR Desc: aleurone specific protein
  misc_feature: Homolog of GI Number: 56713103 NR Desc: type 2 non
  misc_feature: Homolog of GI Number: 37535838 NR Desc: putative lipid transfer protein
  misc_feature: Homolog of GI Number: 37535844 NR Desc: putative lipid transfer protein
  misc_feature: Homolog of GI Number: 37535842 NR Desc: putative lipid transfer protein

SEQ ID NO: 10899 - DNA, 894 bp, Zea mays
  misc_feature: Ceres CLONE ID no. 1689819
  misc_feature: Ceres CDNA ID no. 36706869
  CDS (249)..(755): REFERENCED BY SEQ ID NO: 10900
aacccctctccctctctctctctctctctctctctccactttcctttcctggcagcgacgagtgacgacagtggcaggcgggcgggcgggcgagcgtcgacggcgttctctaggtcttcgttgtccccttcaccggcggctgccaacgccctttgccaggtcttcgttgtcaccttcgccggcgactgtcacggccccttcgccagctcttcgtctgccccttccccggtaccgggactgaagataagatggctgccttaccattggccaccgcagaagcatgtgatgctaatgctgctttaattatgaatggtgatcttcgttctctccaacctatcttccaaatctatggaggccggcagatttttgctggccctgttgtgacactgaagatctttgaggataacgttctgctccgcgagttccttgaggagaaaggtcacggcagggtcctggtggttgatgccggtgggagcatgcgttgtgcagttttgggtggcaaccttgcccagctgatgcagaacaatgggtgggctggaatcgttgtcaatggctgcatcagagatgtcgacgagataaatggctgcgacgttggtgtccgggctctgaattcacaccctatgaagtctaacaagaagggcgtcggtgagaagcatgtccctgtgacctttgcagggacaagaatctgcgatggagaatggctctatgccgattccgatggcattctcatctcaagatcagaattgagtgtgtaggcctgttcttatgttatgtgtgaacttgtaataatgtatagctgaattacatgactagcgggaatactttggacgttttgtcagtatcgtttggaatatattcctttgaaaattattgcaccaaaaaaaaaaaaaaaaa

SEQ ID NO: 10900 - protein, 168 aa, Zea mays
  misc_feature: Ceres CLONE ID no. 1689819
  misc_feature: Ceres CDNA ID no. 36706869
  misc_feature (11)..(161): Pfam Name: Methyltransf_6 PFAM Desc: Demethylmenaquinone methyltransferase
  misc_feature: Homolog of GI Number: 34910724 NR Desc: S
  misc_feature: Homolog of GI Number: 51964406 NR Desc: PREDICTED P0486G03.12 gene product
  misc_feature: Homolog of GI Number: 50913039 NR Desc: S
  misc_feature: Homolog of GI Number: 21537415 NR Desc: S
  misc_feature: Homolog of GI Number: 6728985 NR Desc: putative S
  misc_feature: Homolog of GI Number: 38603934 NR Desc: At5g56260
  misc_feature: Homolog of GI Number: 53761422 NR Desc: COG0684: Demethylmenaquinone methyltransferase
  misc_feature: Homolog of GI Number: 67763208 NR Desc: COG0684: Demethylmenaquinone methyltransferase
  misc_feature: Homolog of GI Number: 83655178 NR Desc: regulator of ribonuclease activity A
  misc_feature: Homolog of GI Number: 17546073 NR Desc: PROBABLE S
MAALPLATAEACDANAALIMNGDLRSLQPIFQIYGGRQIFAGPVVTLKIFEDNVLLREFLEEKGHGRVLVVDAGGSMRCAVLGGNLAQLMQNNGWAGIVVNGCIRDVDEINGCDVGVRALNSHPMKSNKKGVGEKHVPVTFAGTRICDGEWLYADSDGILISRSELSV

SEQ ID NO: 10901 - DNA, 2492 bp, Zea mays
  misc_feature: Ceres CLONE ID no. 1690043
  misc_feature: Ceres CDNA ID no. 36707611
  CDS (159)..(2180): REFERENCED BY SEQ ID NO: 10902
aatcccacccctcgcccaatgcgtagttgtatctgcatctccaacaccaccagcagaggttccagttagttttttttagattagaaaaatcgagtccaacagactcgccgcactgcgcgggatcgacctcgtcgcaactcccgtgtgcgccgccaataatggagacccgggacacggatgcgacgccgctcccctactcgtacacgccgctgccggccgccgacgccgcgtcggccgaggtctccggcaccggcaggacgcggagcaggcggcggcccctctgcgcggcggcgctcgtgctctccgccgcgctgctcctagccgtggccgcgctcgtcggcgtcggtagccggcccggcgcggtggggatgacagagtcggcggcctcgtcgccgacgccgagcaggagcaggggccccgaggccggcgtgtccgagaagacgtccggcgcgtctgacgacggcggcaggctccgtggagccggcgggaacgccttcccgtggagcaatgcgatgctgcagtggcagcgcacgggattccacttccagccgcagaagaactggatgaacgaccccaatggccccgtgtactacaagggctggtaccacctcttctaccagtacaaccctgacggcgccatctggggcaacaagatcgcgtggggccacgccgtgtcccgcgacctgatccactggcgccacctcccgctggccatggtgcccgaccagtggtacgacaccaacggcgtgtggacggggtccgccaccacgctccccgacggccgcctcgccatgctctacacgggctccaccaacgcctccgtccaggtgcagtgcctggccgtgcccgccgacgacgccgacccgctgctcaccaactggaccaagtacgagggcaacccggtgctgtacccgcccccgggcatcgggcccaaggacttccgcgaccccaccacggcctggatcgacccctcggacggcgcatggcgcgtcgtcatcggctccaaggacgacgacggccacgcgggcatcgccgtcgtctaccgcaccacggacctggtgcacttcgagctcctcccgggcctgctccaccgcgtcgacggcaccggcatgtgggagtgcatcgacttctaccccgtcgccacacgaggcagggcgtcggccaacggcgtcgacatgtccgacgccatcgccagcaacggcgccgtcgccggggacgtcctgcacgtcatgaaggccagcatggacgacgaccgccacgactactacgcgctggggaggtacgacgcggccgccaacgcctggacgccgatcgacgccggcagggacgtcggcatcggcctgcgctacgactggggcaagttctacgcgtccaagacgttctacgacccggccaagcgccgccgcgtgctgtggggatgggttggcgagacagactcggagcgcgcggacgtgtccaagggatgggcgtcgctgcagggtatcccccggacggtgctcctggacaccaagacgggtagcaacctgctgcagtggcccgtggaggaggtggagacgctgcgcaccaactccaccgacctcagcggcatcaccatcgactacggctccgtgttcccgctcaacctccgccgcgccacccagctggacatcgaggcggagttccagctggaccgccgcgccgtcatgtcgctcaacgaggcggacgtgggctacaactgcagcaccagcgggggcgccgccggccgcggcgcgctggggcccttcggcctgctcgtcctcgccgaccgccgcctccgccgcgagcagacggccgtctacttctacgtggccaagggcctggacggctccctcgccacgcacttctgccaggacgagtcccgctcctccagcgccaccgacatcgtcaagcgcgtcgtcggcagcgccgtccccgtgctggaggacgaggccacgctctcgctccgggtgctcgtcgaccactccatcgtcgagagcttcgcgcagggcgggaggtccaccgccacatcgcgcgtctaccccaccgaggccatctacgccaacgccggcgtcttcctcttcaacaacgccaccgccgcgcgggtcacggccacgaagctcgtcgtccacgagatggactcgtcatacaaccacgactacatggcgccggtggcagacatctgatcgatgcaatgcaaccacgccactctgcaccgcaacaaattttccaacacacataaatataccaagcaattcccatctgtcaaattttcttatttccctgccatgattttggtctctatttttcctgctggctactacttatcttccagcactagtaatgtacgtactggctagtaactagggtatccagtgggaagacgtgtagcctctagttgtacatgcatgtatgatgctgtgtagcaccgcatcatgcacaccacaccaatgcaaatgagttataaatgtttttaagctcaaaaaaaaaaaaaaaaa

SEQ ID NO: 10902 - protein, 673 aa, Zea mays
  misc_feature: Ceres CLONE ID no. 1690043
  misc_feature: Ceres CDNA ID no. 36707611
  misc_feature (128)..(617): Pfam Name: Glyco_hydro_32 PFAM Desc: Glycosyl hydrolases family 32
  misc_feature: Homolog of GI Number: 3367690 NR Desc: 1
  misc_feature: Homolog of GI Number: 6630447 NR Desc: F23N19.3
  misc_feature: Homolog of GI Number: 4454118 NR Desc: Inv*Dc4' protein
  misc_feature: Homolog of GI Number: 62176934 NR Desc: acid beta
  misc_feature: Homolog of GI Number: 1857714 NR Desc: acid beta
  misc_feature: Homolog of GI Number: 33359653 NR Desc: acid invertase
  misc_feature: Homolog of GI Number: 546937 NR Desc: acid invertase
  misc_feature: Homolog of GI Number: 22671 NR Desc: beta
  misc_feature: Homolog of GI Number: 22723 NR Desc: beta
  misc_feature: Homolog of GI Number: 529516 NR Desc: beta
METRDTDATPLPYSYTPLPAADAASAEVSGTGRTRSRRRPLCAAALVLSAALLLAVAALVGVGSRPGAVGMTESAASSPTPSRSRGPEAGVSEKTSGASDDGGRLRGAGGNAFPWSNAMLQWQRTGFHFQPQKNWMNDPNGPVYYKGWYHLFYQYNPDGAIWGNKIAWGHAVSRDLIHWRHLPLAMVPDQWYDTNGVWTGSATTLPDGRLAMLYTGSTNASVQVQCLAVPADDADPLLTNWTKYEGNPVLYPPPGIGPKDFRDPTTAWIDPSDGAWRVVIGSKDDDGHAGIAVVYRTTDLVHFELLPGLLHRVDGTGMWECIDFYPVATRGRASANGVDMSDAIASNGAVAGDVLHVMKASMDDDRHDYYALGRYDAAANAWTPIDAGRDVGIGLRYDWGKFYASKTFYDPAKRRRVLWGWVGETDSERADVSKGWASLQGIPRTVLLDTKTGSNLLQWPVEEVETLRTNSTDLSGITIDYGSVFPLNLRRATQLDIEAEFQLDRRAVMSLNEADVGYNCSTSGGAAGRGALGPFGLLVLADRRLRREQTAVYFYVAKGLDGSLATHFCQDESRSSSATDIVKRVVGSAVPVLEDEATLSLRVLVDHSIVESFAQGGRSTATSRVYPTEAIYANAGVFLFNNATAARVTATKLVVHEMDSSYNHDYMAPVADI

SEQ ID NO: 10903 - DNA, 768 bp, Zea mays
  misc_feature: Ceres CLONE ID no. 1690094
  misc_feature: Ceres CDNA ID no. 40041568
  CDS (84)..(572): REFERENCED BY SEQ ID NO: 10904
agtcgatcaatactatactactatcacagtaggaagctaggaggaaatcaaagcaacaaagttgctggccgagagaagcaaccatgagacctcaggcgtcgttactcgtcacactggctgttatcgtcgtcgtccttgcagctctgccactcagcaaaggtatacgcgcgcacgttggctatatttgctgcatggtggccacggcatgcatgcagggacggaggaggaaggaggaggaggggaggcagtcgccgccgtggacgccgccgccggaacgagctcgtggccatgctgcaacaagtgcggtttctgctacctgtctgacccgccgcagtgccaatgcctggacttctcgacggtcgggtgccacccagagtgcaagcagtgcatcaggtacaccgccgacggtggcgtcgacatcccgcccgtgcacgcctaccgctgcgccgacatcctcttcaacttctgcgagcgccgctgcactcccgccgcagttgctgctagcaccaagtagacggatgcatatgcatgccatcgttgccgccgtgtgtgccgcttcagagaagaactaaataaatgttgccgcgcgctgttgatgcgcgtgcatgcctctccttgaataaaccaatatttctataattattgtaggatgtccaactttcttaagtttgaaaaataaatggcgctgcttcatatgatgctggtgtccatgaattaacctgcatcgtcacttcagttaaaaaaaaaaaagaaaaaaaaaaaaaaaaa

SEQ ID NO: 10904 - protein, 162 aa, Zea mays
  misc_feature: Ceres CLONE ID no. 1690094
  misc_feature: Ceres CDNA ID no. 40041568
  misc_feature: Homolog of GI Number: 34897400 NR Desc: putative Bowman
MRPQASLLVTLAVIVVVLAALPLSKGIRAHVGYICCMVATACMQGRRRKEEEGRQSPPWTPPPERARGHAATSAVSATCLTRRSANAWTSRRSGATQSASSASGTPPTVASTSRPCTPTAAPTSSSTSASAAALPPQLLLAPSRRMHMHAIVAAVCAASEKN

SEQ ID NO: 10905 - DNA, 641 bp, Zea mays
  misc_feature: Ceres CLONE ID no. 1690275
  misc_feature: Ceres CDNA ID no. 40352085
  CDS (3)..(407): REFERENCED BY SEQ ID NO: 10906
aaccaggcaccagcatagatctcgtgctcgccactattattctgcacagcaacgcatcagccttctggaaccatctcgccgccgccacaccacaatccacaacccgtcgaagcgaagcaagcaatggccggagtcggatcgaaggccctcgccgttgccgccgttctggcggccgtctccttctcggtggccgccgcggccgaggcgcccgcgcccagccccgtctccgccgccgtcgcggcgtcgtcgcccttcgccgcggctctcgtcgcctccgccgccgccttcctcttcgccgccgtccgccactgagccgatggggcctcgtgcctgcaggctacctagcagtacttcccccgccgccgccgccgccgcctagatctatttattggagtgctatccagtagtactagtagtagtgagatttgttcggtgctgtcgtgtcgtcgtcgcattttggtcggatctggtttccttggtgcagggagggtttctataccatgtcgcggtgtcggttgtgtgatctcatcccccccttgtagatagtactctgctatctcgtcgtgatcgtgagtggtgattctgtctggttgatatttgctactgatattggtcccatttgacaaaaaaaaaaaaaaaaa

SEQ ID NO: 10906 - protein, 62 aa, Zea mays
  misc_feature: Ceres CLONE ID no. 1690275
  misc_feature: Ceres CDNA ID no. 40352085
MAGVGSKALAVAAVLAAVSFSVAAAAEAPAPSPVSAAVAASSPFAAALVASAAAFLFAAVRH

SEQ ID NO: 10907 - DNA, 907 bp, Zea mays
  misc_feature: Ceres CLONE ID no. 1690299
  misc_feature: Ceres CDNA ID no. 35393757
  CDS (376)..(591): REFERENCED BY SEQ ID NO: 10908
aaagattagttacccttattcggagcctctcaccaaattttacataagcaatacgctgaccatcaccataaagaagcatcgttaggaatcaagatggccgaaagaatttctcacaaacacaagggcacctcttctcttagattgatgggttacccaagattaaactactgtcctcgcctttctttctactgaacttttcaccgcatgtgttgattcatcttcagatccgtcgaaatccgatgaccgtacccgcctctgatgttcaggtccagaagtagcaacccttcgtccgtagcgcacttgacatcgtccccgtcatgaactccatggtacggctgaaagtctagattgttcgctctgagaccgtcctcggacatggctttcaccagctcgccgttgttctgctcgcacgcctgggtcacgttgtccatgaagcctgagagcgcgaggttgaagtccgtcagctgcgacctggttgcttctaggtttgcggctccagtcgcgtggtacgagaggttgctctgggccttctcgagtatcgtctgcaagtatttgccttgcgcctcgatccgcatctgcagcttcttctgaacctgcacttggaaaacgaagagcgcatctgcaagtggcgtttctctgatccacgttcagaaacgataaggcgaacggaaatgggagaaccgtgacagagatgaagaatgatgtaaatttacacaaatggaaaccatttgtaaacaattcctttttttttctctctaaaaacaagtagttcaaacatcacagtgagtgatctgtatattgtatgcagcctagcagacatggttgctccagttgggtgacagaaatactgaaacagtccgattctgaaatcctaacccagcatttaacttaaaaaaaaaaaaaaaaa

SEQ ID NO: 10908 - protein, 71 aa, Zea mays
  misc_feature: Ceres CLONE ID no. 1690299
  misc_feature: Ceres CDNA ID no. 35393757
MAFTSSPLFCSHAWVTLSMKPESARLKSVSCDLVASRFAAPVAWYERLLWAFSSIVCKYLPCASIRICSFF

SEQ ID NO: 10909 - DNA, 691 bp, Zea mays
  misc_feature: Ceres CLONE ID no. 1690301
  misc_feature: Ceres CDNA ID no. 36706870
  CDS (71)..(484): REFERENCED BY SEQ ID NO: 10910
acttctccccccactacccaaacccaacaggcggcgcagcagcatcgccaccaccgtccaaagagcaaagatggtgaagttcctcaagcccggcaaggccgttatcctcctccagggccggttcgccggccggaaggccgtgatcgtgcgcgttttcgaggagggcacccgtgatcgtccctacgggcactgcctcgtcgcgggcctcgctaagtaccccaagaaggtgatccgcaaggactccgccaagaagacggccaagaagtcccgcgtcaagtgcttcatcaagctcgtcaacttcacgcacctcatgcccacccgctacaccctcgacgtcgactttaaggacgtcgcatcgggcgggcccgacgcgctctccacccgggacaagaaggtcgaagcctgcaaggccgccaaggcgcgcctcgaggagaggttcaagaccggcaagaacaggtggttctttaccaaactccgcttctagacgtcgggcgtccctcatagtgtctgatctagttgtcaatttcttgtacctgaaaccctttaaggtatctctgttttgctatttccatgaaggcttcgtgcttggtatggatcttggagaggattttgttaaaaacatgtcgatgatattaaattatgccaaagcacacatatggttggattttgtggagaaaaaaaaaaaaaaaaa

SEQ ID NO: 10910 - protein, 137 aa, Zea mays; identical to SEQ ID NO: 6970
  misc_feature: Ceres CLONE ID no. 1690301
  misc_feature: Ceres CDNA ID no. 36706870
  misc_feature (5)..(40): Pfam Name: KOW PFAM Desc: KOW motif
  misc_feature (52)..(137): Pfam Name: Ribosomal_L27e PFAM Desc: Ribosomal L27e protein family
  misc_feature: Homolog of GI Number: 50906961 NR Desc: putative 60S ribosomal protein L27
  misc_feature: Homolog of GI Number: 37536910 NR Desc: putative ribosomal protein L27
  misc_feature: Homolog of GI Number: 20466061 NR Desc: putative ribosomal protein
  misc_feature: Homolog of GI Number: 8131701 NR Desc: ribosomal protein L27
  misc_feature: Homolog of GI Number: 23198420 NR Desc: putative ribosomal protein L27
  misc_feature: Homolog of GI Number: 21554529 NR Desc: ribosomal protein L27
  misc_feature: Homolog of GI Number: 7441035 NR Desc: ribosomal protein L27
  misc_feature: Homolog of GI Number: 7441033 NR Desc: ribosomal protein L27
  misc_feature: Homolog of GI Number: 20768 NR Desc: ribosomal protein L27
  misc_feature: Homolog of GI Number: 6010292 NR Desc: 60S ribosomal protein L27

SEQ ID NO: 10911 - DNA, 890 bp, Zea mays
  misc_feature: Ceres CLONE ID no. 1690477
  misc_feature: Ceres CDNA ID no. 40041569
  CDS (188)..(691): REFERENCED BY SEQ ID NO: 10912
aaaaaagcatccaaaacaactccactcctcccaccccaagtccgaagcttcctcctcctccaactcctcctcctccccgtcccgcagtcgcactcgcaccgcacggcagcaggtagctagctagctagctgcgggcttctgtagccaagcagggccggagcacgcacgcacgcgcgagcgcgagcgcatggcggcgtccgcgagccgggcccgcgccggcgccggcggcgctggcgaggagtacgaggacctgctgccggtgatgggcgagcggctgggcgtggcggggctgctggcggagctgcgcgcggggttcaggctgctggcggaccgggagcggggcgccatcacgcccgacagcctgcggcgcggcgcggcggcggcgctgggcgtggccgggatggcgcacgccgacgcggccgccatggtgcgcgagggcgacgccgacggcgacggcgcgctcagcgaggccgagttctgcgtcctcatggtgcgcctcagccccggcatcatggcccacgccgaggcctggctcgccgacgccatcgccgccgacgagatgcagctggttgatgatgccatgcccatggatgctgctgccgctgatgattacggtggcgccggcagccgaggccacgccgccgccgctcctgatagtgatactgctcccgcccgccggtcgtcggtttgatggatgcatggtccgcgcacgtgtattattagcctgtgcggtcgttgtaaaatcaccgctcgctcgtcatcttgttcattttattactgtgtgtcaattacggtgatgactcctcttcgatctgtacttcatgtggtaataactacgcgaactacggtgtggtttccttggttaacggaatcaaaaaaaaaaaaaaaaa

SEQ ID NO: 10912 - protein, 167 aa, Zea mays
  misc_feature: Ceres CLONE ID no. 1690477
  misc_feature: Ceres CDNA ID no. 40041569
  misc_feature (76)..(104): Pfam Name: efhand PFAM Desc: EF hand
  misc_feature: Homolog of GI Number: 50904877 NR Desc: putative EF
  misc_feature: Homolog of GI Number: 9255753 NR Desc: EF
  misc_feature: Homolog of GI Number: 52076650 NR Desc: putative EF
  misc_feature: Homolog of GI Number: 21595257 NR Desc: putative caltractin
  misc_feature: Homolog of GI Number: 20197776 NR Desc: putative caltractin
  misc_feature: Homolog of GI Number: 34910114 NR Desc: B1100D10.32
  misc_feature: Homolog of GI Number: 21536724 NR Desc: EF
  misc_feature: Homolog of GI Number: 56542451 NR Desc: Avr9/Cf
  misc_feature: Homolog of GI Number: 66776365 NR Desc: PE
  misc_feature: Homolog of GI Number: 66776103 NR Desc: LigA
MAASASRARAGAGGAGEEYEDLLPVMGERLGVAGLLAELRAGFRLLADRERGAITPDSLRRGAAAALGVAGMAHADAAAMVREGDADGDGALSEAEFCVLMVRLSPGIMAHAEAWLADAIAADEMQLVDDAMPMDAAAADDYGGAGSRGHAAAAPDSDTAPARRSSV

SEQ ID NO: 10913 - DNA, 1816 bp, Zea mays
  misc_feature: Ceres CLONE ID no. 1690805
  misc_feature: Ceres CDNA ID no. 40041570
  CDS (118)..(1557): REFERENCED BY SEQ ID NO: 10914
aacaagcaaggaaggaaacccgggcaacacgacaccggcggtgccagtgccacggaaaattagccggctccctccccgacgtccggcggcggccgagcaacggtgctggctcccaacatggagacatataccacagacgacgcgcttaccattatggggtttggaaaattccaagcgcttgttcttttctacgctggaatgggctgggttgcagaagctatggagctcatgctcttgtcgtttctcgggccattcatacgagaggagtggaacgtctccccagagaacgagagcctcctttcgagtgttgtctttgctggcatgctgctaggtgcctgtgcttggggctttgtttccgacaaatatggacggaggactggtttaatattttcaactctatttactagtggaatgggttttctaagcgctttatctcctaactacttatgcttggtggctcttcggtttctggttggagtaggagtgggtggcagccatgtgtttatatcttggtttttggagtttgttcctgcacaaaatcgtggcacttggatggttattttctcccttttctggactctcggcacgatcttggaagcttcacttgcatgggtcgtattgccagcattgaattggaggtggctgctagtcttcaccgcccttccatgcttcctcttgcttcctttctttggactaacacctgagtctccgcgctacctttgtgcacaaaatagaatgtctgatgccacatctgttctagagagaatggccaacgcaaaccaatcagctcttcccccgggagttctcacgtacaatagacaaacaaaatgtgaccatgacgttctcgctcccgagagtgaatgtcttcttcctgtcagagagaaggaatgcacagttgacaatgccaagagctccgaatctggcagtcttgctgcactgcgcatgctattatcgcgcgaactgctcagatcaactctgcttctttggtttgttttctatgcaaattcctttgcttattacgggttagtattgctgacatcgcagttgagtgatgcaaataaaagttgtgcatctggtgtgtcttttggtctgcgccaaaaggaaatcaatctttacaaagacactttcatcactagtttagcagaaatcccaggtttatttttgtctgctgttcttgttgattggtttggtcgaaaagcttcgatgtggtctatgatgttcgcatgctgtgctttccttggaccacttgtacttcaacagactgagttgttgacaactattcttctatttggtgcccgtgcatgtgccatggggagctttacagtcttgtgcctttatgctccagaggtgtatccaacatttgtccggtcaaccggtgcaggaattgcgaccgccattggtaggattggtggggttgtttgccctctcgttgctgtcgccatgctgcggagctgccatcagatggaagcactcattgtgtttgaggtgatattatgccttgctgcagttgcctgcatgttcttccctgtagagaccaagggccgtggaatggactgatgcaatatcaggcttcagcatctagatgagcttgtagttcatcactgtttgttttatgccatcattatgtacagagaatatacatgtaacatggtgtggatagttcctcaaaatatgtgcaggactttccaaatttgtaagacagattttgtactgaaagacagctggttctgtactgccaaaacactgaaagacagagttgtattactcctcaaaaaaaaaaaaaaaaaaaaaaaaaaaaaaaaaaaaaaaaaaaaaa

SEQ ID NO: 10914 - protein, 479 aa, Zea mays
  misc_feature: Ceres CLONE ID no. 1690805
  misc_feature: Ceres CDNA ID no. 40041570
  misc_feature (344)..(444): Pfam Name: MFS_1 PFAM Desc: Major Facilitator Superfamily
  misc_feature (59)..(216): Pfam Name: Sugar_tr PFAM Desc: Sugar
  misc_feature: Homolog of GI Number: 28416475 NR Desc: At3g13050/MGH6_16
  misc_feature: Homolog of GI Number: 50928619 NR Desc: OSJNBa0060N03.20
  misc_feature: Homolog of GI Number: 52076944 NR Desc: putative SV2 related protein
  misc_feature: Homolog of GI Number: 50938505 NR Desc: putative organic cation transporter
  misc_feature: Homolog of GI Number: 37718861 NR Desc: putative sugar transporter
  misc_feature: Homolog of GI Number: 37718860 NR Desc: putative sugar transporter
  misc_feature: Homolog of GI Number: 76781665 NR Desc: synaptic vesicle 2
  misc_feature: Homolog of GI Number: 73995352 NR Desc:  similar to SV2 related protein
  misc_feature: Homolog of GI Number: 37590597 NR Desc: 1110030H18Rik protein
  misc_feature: Homolog of GI Number: 3901268 NR Desc: SV2 related protein
METYTTDDALTIMGFGKFQALVLFYAGMGWVAEAMELMLLSFLGPFIREEWNVSPENESLLSSVVFAGMLLGACAWGFVSDKYGRRTGLIFSTLFTSGMGFLSALSPNYLCLVALRFLVGVGVGGSHVFISWFLEFVPAQNRGTWMVIFSLFWTLGTILEASLAWVVLPALNWRWLLVFTALPCFLLLPFFGLTPESPRYLCAQNRMSDATSVLERMANANQSALPPGVLTYNRQTKCDHDVLAPESECLLPVREKECTVDNAKSSESGSLAALRMLLSRELLRSTLLLWFVFYANSFAYYGLVLLTSQLSDANKSCASGVSFGLRQKEINLYKDTFITSLAEIPGLFLSAVLVDWFGRKASMWSMMFACCAFLGPLVLQQTELLTTILLFGARACAMGSFTVLCLYAPEVYPTFVRSTGAGIATAIGRIGGVVCPLVAVAMLRSCHQMEALIVFEVILCLAAVACMFFPVETKGRGMD

SEQ ID NO: 10915 - DNA, 933 bp, Zea mays
  misc_feature: Ceres CLONE ID no. 1690947
  misc_feature: Ceres CDNA ID no. 29191593
  CDS (53)..(712): REFERENCED BY SEQ ID NO: 10916
aactccgctaccccctcatcctgccatccaccagcagcagtgcaagcagcatatggcgcgccgtgccagcctgctcctcgccgcggcgctgctcgtcgccgtcgctgccgcggcggtgccgccgacgtgcgagcgcatcgagtgcccggcgtacgaggtggtggacagcgccaacgggttcgagatccggcggtacacggacgccatgtggatcaccacggcgcccatcgaggacatctccttcgtcgccgccacgcgcaccggcttcctccagctgttcgactacatccagggcaagaacgcgtacaacgagacgatcgagatgacggcgccggtgctgacgcgggtgtcgcccagcgacgggcccttctgcgcctccgccttcgccgtgagcttctacgtgccggccaagaaccaggcggacccgccgccggccgagggcctgcgcgtggaccgctgggccggggccaggtacgcggccgtgcgccgcttcgggggcttcgtggcggacgccgacgtcggggagcaggcggcgcgcctcgaggccagcctccagggcacccggtgggccgccgctgtcaacgacgcgcgcagggccgacccggcctcgccctacaccgtcgcgcagtacaactcgcccttcgagttcaccggcagggtcaacgagatctggatgctcttcgacgccgacgacgacgccagtacttcgtgatgcgattccaagcgtgctctgggggcacccactgaggcgtttacgaaaggacgcgcatgcaaccgtgcttgccatgaagtatttcgtactcttctgcgctagcttcgtttactttcgagtaaagaataaggtgtcccttgttccaataataatgatcctgcatgtaattacattccatggcacggccattccggcaacaggctcagtaaaaaaaaaaaaaa

SEQ ID NO: 10916 - protein, 219 aa, Zea mays
  misc_feature: Ceres CLONE ID no. 1690947
  misc_feature: Ceres CDNA ID no. 29191593
  misc_feature (28)..(211): Pfam Name: SOUL PFAM Desc: SOUL heme
  misc_feature: Homolog of GI Number: 5734756 NR Desc: Similar to SOUL Protein
  misc_feature: Homolog of GI Number: 21593898 NR Desc: SOUL
  misc_feature: Homolog of GI Number: 72073144 NR Desc:  similar to heme binding protein 2
  misc_feature: Homolog of GI Number: 55962260 NR Desc: novel protein
  misc_feature: Homolog of GI Number: 41055642 NR Desc: similar to heme binding protein 2
  misc_feature: Homolog of GI Number: 76626135 NR Desc:  similar to heme binding protein 2
  misc_feature: Homolog of GI Number: 61811609 NR Desc:  similar to heme binding protein 2
  misc_feature: Homolog of GI Number: 55627460 NR Desc:  similar to KIAA1244
  misc_feature: Homolog of GI Number: 67987177 NR Desc: 4Fe
  misc_feature: Homolog of GI Number: 50751158 NR Desc:  similar to heme binding protein 2
  misc_feature: Utility: MSX Useful for making plants tolerant to low nitrogen
MARRASLLLAAALLVAVAAAAVPPTCERIECPAYEVVDSANGFEIRRYTDAMWITTAPIEDISFVAATRTGFLQLFDYIQGKNAYNETIEMTAPVLTRVSPSDGPFCASAFAVSFYVPAKNQADPPPAEGLRVDRWAGARYAAVRRFGGFVADADVGEQAARLEASLQGTRWAAAVNDARRADPASPYTVAQYNSPFEFTGRVNEIWMLFDADDDASTS

SEQ ID NO: 10917 - DNA, 1185 bp, Zea mays
  misc_feature: Ceres CLONE ID no. 1691212
  misc_feature: Ceres CDNA ID no. 40352086
  CDS (22)..(747): REFERENCED BY SEQ ID NO: 10918
aaatgatattggtggccatagatggttgtgtacatattgttgaatgcgcataggagttgggaggttgaggaagggaatgaccggagtgcaccagaatgtactcattctatctcaggttttgtgctgcagcatcaagttatactcttctgtcttggagaaactttcacagagctacctcctatttaccctctggttgatttgcctataaatactagggcaagcgctgcagattttggtggttcagttcctaaacctgggcttgaagtcaacttagtcgacgctgttccttgtcgaatagcatttgagaggggcaaagaacggcacttctgctttttagccatagctcatggaacttctggttggattcttcttctagaagaattacctctaaaacgggaacgaggaattgtccgtgtcatggcacctttggcaggatctgatccaagaatagatacaaagcatgggaagtggttacatctacgcattcgcccttcttcggtcccttttttggacactgagaagcataaagcgaagacaaagaagtatcttgttgatgggagatggacccttgcttttagggacgagcagtcctgtaaggttgcagagagtatggttattgaagagatgaaactccaacgaggtgctgttgcagagcaattgaagccattggttgaatttgacatgcctgaggatggaatgcagcacccccagacttcacatgaaaccccttctgatgatggatcatgactaaattttcatcaagtgcagtgttgagcttctcaattaaggagacatggcaacagatggccgcaaaagtgccgcattgaacatttcaagcatgctggcaggaaaacccaccatggcaagtcatcgacaattctgtacattacattgggagattagagatgtctccttgttaacacacaactgtagagtttcgggccgtcctgagttgaactagctggataggattctttgtacaatagtttgtttctctccttgcccgttgtaaccttatatatcacatcaaaacccattctttgttaagtttcagggcacagttgtgttgtgcacacgaaatgtttaaagaaatttgcagttagtcatacctgttgtcaaagcaagccttgcctatgtggtaataaaatgtcagatcgataatttttctaaaaaaaaaaaaaaaaa

SEQ ID NO: 10918 - protein, 241 aa, Zea mays
  misc_feature: Ceres CLONE ID no. 1691212
  misc_feature: Ceres CDNA ID no. 40352086
MVVYILLNAHRSWEVEEGNDRSAPECTHSISGFVLQHQVILFCLGETFTELPPIYPLVDLPINTRASAADFGGSVPKPGLEVNLVDAVPCRIAFERGKERHFCFLAIAHGTSGWILLLEELPLKRERGIVRVMAPLAGSDPRIDTKHGKWLHLRIRPSSVPFLDTEKHKAKTKKYLVDGRWTLAFRDEQSCKVAESMVIEEMKLQRGAVAEQLKPLVEFDMPEDGMQHPQTSHETPSDDGS

SEQ ID NO: 10919 - DNA, 2750 bp, Zea mays
  misc_feature: Ceres CLONE ID no. 1691371
  misc_feature: Ceres CDNA ID no. 40041572
  CDS (116)..(2287): REFERENCED BY SEQ ID NO: 10920
atcctctcccactccctcgtccctccccctcgtccagttcactcccattgggcgagaagccgagaaggacagggagggagcgagagctagccaggccgtcccgtccagagccgctatgtccggcggcgcgcccctcctggccctgctgctgctggcggcggcggccatgatcgccccgtcgccggccaatgccgccgtgtcgtacgaccacagggccgtggtcatcaacgggcagcgccgcatcctcatctcggggtccatccactacccgcgcagcacgccggagatgtggccggggctgctgcagaaggccaaggacggcgggctggacgtggtccagacgtacgtgttctggaacgggcacgagccggtgcgtgggcagtactacttcggcgaccgctacgacctcgtccgcttcgtcaagctcgccaagcaggccggcctctacgtccacctccgcatcgggccatacgtctgcgccgagtggaacttcggcggtttccccgtgtggctcaagtacgtccccggcatcagcttccgcaccgacaacggccccttcaaggcggcgatgcaggcgttcgtggagaagatcgtgtccatgatgaagtcggaggggctgttcgagtggcagggcgggcccatcatcctggcgcaggtggagaacgagtacgggcccatggagtccgtcatgggcgccggcgccaagccctacgccaactgggcagccaagatggccgtcgccaccggcgccggcgtgccctgggtcatgtgcaagcaggacgacgccccggaccccgtgatcaacacctgcaacggcttctactgcgactacttcagccccaactccaacagcaagccgaccatgtggaccgaggcctggacgggctggttcacggcgttcggtggcgcggtgccgcaccggccggttgaggacatggccttcgccgtggcgcgcttcatccagaagggcggctccttcgtcaattactacatgtaccatggaggtaccaacttcgaccgcacctccggcgggccgttcatcgccaccagctacgactacgacgcgccgatcgacgaatacggtctgctgaggcagccgaaatgggggcacctgagggacctgcacaaggccatcaagcaagccgagccggcgctggtctccggcgacccgacgatccagtcccttgggaactacgagaaggcgtacgtgttcaagtcgagcggcggcgcctgcgcggcgttcctgtccaactaccacaccagcgccgcggcgcgggtggtgttcaacgggcggcgctacgacctcccggcctggtccatcagcgtgctgcccgactgcaaggccgccgtgttcaacacggcgacggtgagcgagccgtcggcgccggcgcggatgagccccgcgggcggcttctcgtggcagtcgtacagcgaggccaccaactcgctggacggccgcgccttcaccaaggacgggctggtggagcagctcagcatgacgtgggacaagtcggactacctgtggtacaccacctacgtgaacatcaactcgaacgagcagttcttgaagtccggacagtggccgcagctgaccgtctactctgccggccactccctgcaggtgttcgtcaacggccagtcctacggcgccgtgtatggcggctacgacagccccaagctgacatacagcggctacgtgaagatgtggcaggggagcaacaagatctccatcctcagcgcagcagtcggcctccctaaccagggcacccactacgagacgtggaacgtcggagtgctcggtccggtcacgctgtccggcctcaacgaggggaagcgggacctcagcaaccagaagtggacctaccagatcggcctccacggcgagtcgctgggcgtgcagtccgtcgccgggagctcgtccgtcgagtggggcagcgcggcagggaagcaacccttgacatggcacaaggcctacttcagcgcgccgtccggcgacgcgccggtggccctggacatgggcagcatgggcaagggccaggcgtgggtgaacggccgccacatcgggcggtactggtcgtacaaggcatcctcctccggcggctgcggcggctgcagctacgcggggacgtacagcgagaccaagtgccagaccggctgcggcgacgtctcccagaggtactaccacgtcccgcgctcctggctcaaccccagcggcaacctgctggtgctgctcgaggagttcggcggcgacctgcccggcgtgaagctggtgaccaggacggcgtgatcaggaatggagaggggagggcatgccgcacgcacacaggatgtgaataatttgctgggaagagaagcgagctgagggcagggcgcgcgcgcgcagacacgacaccgattctttcttcctcgtgaagtatctatagatacggcgtacatacggtcacaattcgtgcccactatacgtacgtacaaaaaagattagtacactagcgtttactgtaggtctgttcttggagttggccgtcgccggcacggctgcaggaactgcggctcacggccggctggtaatggtactagtagcatggtttttgctctgcagtccgcatgaatctcaaggcgcacgcaggcttaattttcttagcacaaatttgcgaaactgagttgtaaatgaggttatttattcctacgattaagtaggatacaagacgaataattattatgtgagttctttttaaaaaaaaaaaaaaaaa

SEQ ID NO: 10920 - protein, 723 aa, Zea mays
  misc_feature: Ceres CLONE ID no. 1691371
  misc_feature: Ceres CDNA ID no. 40041572
  misc_feature (34)..(340): Pfam Name: Glyco_hydro_35 PFAM Desc: Glycosyl hydrolases family 35
  misc_feature: Homolog of GI Number: 23308221 NR Desc: At3g52840/F8J2_10
  misc_feature: Homolog of GI Number: 79517234 NR Desc: BGAL7
  misc_feature: Homolog of GI Number: 61162194 NR Desc: beta
  misc_feature: Homolog of GI Number: 61162196 NR Desc: beta
  misc_feature: Homolog of GI Number: 61162201 NR Desc: beta
  misc_feature: Homolog of GI Number: 61162203 NR Desc: beta
  misc_feature: Homolog of GI Number: 61162206 NR Desc: beta
  misc_feature: Homolog of GI Number: 61162208 NR Desc: beta
  misc_feature: Homolog of GI Number: 9294020 NR Desc: beta
  misc_feature: Homolog of GI Number: 452712 NR Desc: beta
MSGGAPLLALLLLAAAAMIAPSPANAAVSYDHRAVVINGQRRILISGSIHYPRSTPEMWPGLLQKAKDGGLDVVQTYVFWNGHEPVRGQYYFGDRYDLVRFVKLAKQAGLYVHLRIGPYVCAEWNFGGFPVWLKYVPGISFRTDNGPFKAAMQAFVEKIVSMMKSEGLFEWQGGPIILAQVENEYGPMESVMGAGAKPYANWAAKMAVATGAGVPWVMCKQDDAPDPVINTCNGFYCDYFSPNSNSKPTMWTEAWTGWFTAFGGAVPHRPVEDMAFAVARFIQKGGSFVNYYMYHGGTNFDRTSGGPFIATSYDYDAPIDEYGLLRQPKWGHLRDLHKAIKQAEPALVSGDPTIQSLGNYEKAYVFKSSGGACAAFLSNYHTSAAARVVFNGRRYDLPAWSISVLPDCKAAVFNTATVSEPSAPARMSPAGGFSWQSYSEATNSLDGRAFTKDGLVEQLSMTWDKSDYLWYTTYVNINSNEQFLKSGQWPQLTVYSAGHSLQVFVNGQSYGAVYGGYDSPKLTYSGYVKMWQGSNKISILSAAVGLPNQGTHYETWNVGVLGPVTLSGLNEGKRDLSNQKWTYQIGLHGESLGVQSVAGSSSVEWGSAAGKQPLTWHKAYFSAPSGDAPVALDMGSMGKGQAWVNGRHIGRYWSYKASSSGGCGGCSYAGTYSETKCQTGCGDVSQRYYHVPRSWLNPSGNLLVLLEEFGGDLPGVKLVTRTA

SEQ ID NO: 10921 - DNA, 653 bp, Zea mays
  misc_feature: Ceres CLONE ID no. 1691850
  misc_feature: Ceres CDNA ID no. 36707333
  CDS (17)..(484): REFERENCED BY SEQ ID NO: 10922
aactgacgagctcgccatggcctccctctcctctgccgccgtcaccgccccttccttcgccgcaccagcgccagcccgcgccgtggtcagaaggaggtccttcaccgtgcgcgcctctctccgcaaggccaccggcaccgccgccgtggcaatggctgccagcgccctgcttgccggcggtgccatggcccaggaggtgctgctgggggcaggcgacggcgggctcgtcttcgagcccagccagttcaccgtcaaggccggcgacaccatcacattcaagaacaacgccggcttcccgcacaacgtcgtcttcgacgaagacgaggtgccgagcggcgtcgacgccaccaagatctcgcaggaggagtacctcaacgcgccaggcgagacctactccgtcaccctcaccgtgccgggaacctacggcttctactgcgagccgcatcaaggagccggaatggtcggcaagatcaccgtcaactaattaagctagctatcgatcgatatccattcatgtattagctgttgcttcctgctttgtactccgccgatctgtccatctctacatgttttcgtcttcacacaacaacctctgctacgactacgtatatatgcatgctactagctgattgatttaaaaaaaaaaaaaaaaa

SEQ ID NO: 10922 - protein, 155 aa, Zea mays
  misc_feature: Ceres CLONE ID no. 1691850
  misc_feature: Ceres CDNA ID no. 36707333
  misc_feature (59)..(155): Pfam Name: Copper PFAM Desc: Copper binding proteins
  misc_feature: Homolog of GI Number: 55296746 NR Desc: plastocyanin
  misc_feature: Homolog of GI Number: 2267595 NR Desc: plastocyanin precursor
  misc_feature: Homolog of GI Number: 22705 NR Desc: plastocyanin precursor
  misc_feature: Homolog of GI Number: 130269 NR Desc: Plastocyanin
  misc_feature: Homolog of GI Number: 225873 NR Desc: plastocyanin precursor
  misc_feature: Homolog of GI Number: 21759334 NR Desc: Plastocyanin
  misc_feature: Homolog of GI Number: 21592405 NR Desc: plastocyanin
  misc_feature: Homolog of GI Number: 166790 NR Desc: plastocyanin
  misc_feature: Homolog of GI Number: 12018147 NR Desc: vegetative cell wall protein gp1
MASLSSAAVTAPSFAAPAPARAVVRRRSFTVRASLRKATGTAAVAMAASALLAGGAMAQEVLLGAGDGGLVFEPSQFTVKAGDTITFKNNAGFPHNVVFDEDEVPSGVDATKISQEEYLNAPGETYSVTLTVPGTYGFYCEPHQGAGMVGKITVN

SEQ ID NO: 10923 - DNA, 810 bp, Zea mays
  misc_feature: Ceres CLONE ID no. 1691941
  misc_feature: Ceres CDNA ID no. 36707478
  CDS (136)..(597): REFERENCED BY SEQ ID NO: 10924
aaaaaaaaaaaaaaaaaaaaaaaaaaaaaaaaaaaaaaaaaaaaaaaaaaaccctacccgactccgccgccgcccgccgctccgcctcagcgcatagcccgccgcgacctcatcgatcaccttcaactttcaatcatggcggacgtcgatgtcgaaccggaggttgccgccggagctcccaagaagaggacgttccgcaagtacagctaccgcggcgtcgacctagatgcgcttctcgacatgtccacggacgacctcgtccagctcttccccgcgcgcgccaggagaaggttccagaggggtctgaagaggaagcccatggcgctcatcaagaagctgcgcaaggcgaaaaaagatgctcctgctggtgagaaaccagagccagtcaagacacatctccgtaacatgatcattgtccctgagatgattggaagcattgttggtgtctacaacggcaagaccttcaaccaggttgagatcaagcctgagatgatcggccactaccttgctgagttctccatctcctataagccggtcaagcatggcaggcccggtatcggtgccacccactcctcgcggtttattcctctgaaatgagctgttacccggctctgtagtctcccaagagtcagttggcaatgttcgttcagcttttctacttgttttgaacaagttaaatgcccaagatattttgttttgttccattccagctcaagaattcaaagctaagcattgcacaattatgctgttttgttggaagtttttgagttaatcatatctaagctgagttgctaaaaaaaaaaaaaaaaa

SEQ ID NO: 10924 - protein, 153 aa, Zea mays; identical to SEQ ID NO: 6834
  misc_feature: Ceres CLONE ID no. 1691941
  misc_feature: Ceres CDNA ID no. 36707478
  misc_feature (55)..(136): Pfam Name: Ribosomal_S19 PFAM Desc: Ribosomal protein S19
  misc_feature: Homolog of GI Number: 50919151 NR Desc: putative 40S ribosomal protein S15
  misc_feature: Homolog of GI Number: 50934735 NR Desc: putative 40S ribosomal protein S15
  misc_feature: Homolog of GI Number: 15425963 NR Desc: 40S ribosomal protein S15
  misc_feature: Homolog of GI Number: 20465567 NR Desc: putative ribosomal protein S15
  misc_feature: Homolog of GI Number: 20147171 NR Desc: At1g04270/F19P19_29
  misc_feature: Homolog of GI Number: 1107485 NR Desc: 40S ribosomal protein S15
  misc_feature: Homolog of GI Number: 82621162 NR Desc: 40S ribosomal protein S15
  misc_feature: Homolog of GI Number: 2982268 NR Desc: probable 40S ribosomal protein S15
  misc_feature: Homolog of GI Number: 81076490 NR Desc: 40S ribosomal protein S15
  misc_feature: Homolog of GI Number: 79316582 NR Desc: RPS15

SEQ ID NO: 10925 - DNA, 701 bp, Zea mays
  misc_feature: Ceres CLONE ID no. 1691964
  misc_feature: Ceres CDNA ID no. 36707479
  CDS (68)..(523): REFERENCED BY SEQ ID NO: 10926
aattattatccacaacactcatcgatctacacacatacatagtttcttctactacacgacgacaaacatggggaagcctgcgaagatcggagagtggggtggatacgccggcgatcgtcgggatctgagggctactccggaccggctgatcgaggtgaaggtcacggcggacaacagcagctgcatccgctccatctccttcatctacatcggagccgatggcaaaccgtacgaggaggggccatggggtttcggccatgctggcacggagtacaagattgatctgtgcaggttcgacgagagcttgacggagatctccgggaccacgggcccagcctacaacattgacaatctggtcaagtctctcaaattcgtcaccaacaaacgcgcttacggaccgtacggcagggacgagggcaccccgttccgtgtcaaggtgatgaacaacggccacgtcgctggcttctttggccgctctggagattgcctggacgcgatcgggctctacgtgaaccccaactaataactaaaacgatggatcggatcatctgcatgcatgcatatgcagtatgcatgctgcttgcctgcctgtaacgaatatgaatgcataaaataacgcccctgctgctcccatgcatcagcagtgtgtaccactatgttatatatatatatactgtatttcgcaaaaaaaaaaaaaaaaa

SEQ ID NO: 10926 - protein, 151 aa, Zea mays
  misc_feature: Ceres CLONE ID no. 1691964
  misc_feature: Ceres CDNA ID no. 36707479
  misc_feature (15)..(150): Pfam Name: Jacalin PFAM Desc: Jacalin
  misc_feature: Homolog of GI Number: 77553871 NR Desc: jacalin homolog
  misc_feature: Homolog of GI Number: 77551205 NR Desc: NBS
  misc_feature: Homolog of GI Number: 34895152 NR Desc: Mannose
  misc_feature: Homolog of GI Number: 54778542 NR Desc: horcolin
  misc_feature: Homolog of GI Number: 397616 NR Desc: salT
  misc_feature: Homolog of GI Number: 2072553 NR Desc: salT gene product
  misc_feature: Homolog of GI Number: 77554452 NR Desc: jacalin homolog
  misc_feature: Homolog of GI Number: 1167955 NR Desc: putative 32.7 kDa jasmonate
  misc_feature: Homolog of GI Number: 1167953 NR Desc: putative 32.6 kDa jasmonate
  misc_feature: Homolog of GI Number: 77551201 NR Desc: stripe rust resistance protein Yr10
MGKPAKIGEWGGYAGDRRDLRATPDRLIEVKVTADNSSCIRSISFIYIGADGKPYEEGPWGFGHAGTEYKIDLCRFDESLTEISGTTGPAYNIDNLVKSLKFVTNKRAYGPYGRDEGTPFRVKVMNNGHVAGFFGRSGDCLDAIGLYVNPN

SEQ ID NO: 10927 - DNA, 580 bp, Zea mays
  misc_feature: Ceres CLONE ID no. 1691990
  misc_feature: Ceres CDNA ID no. 35383545
  CDS (47)..(469): REFERENCED BY SEQ ID NO: 10928
agaaggcccacccagacccaggtgcgtgtttgattccgaggcggggatgacgagcccaatggtggccaccccggtccagttccacacaaccggccgcctcagcttctgctccttttcctttcccagcgcatcagggaggcggcgattcgcggcggtgagggcgtccgcggagacgatggcgacggagaagctgggcatcaaggtggagcgcaacccgcccgagtcccgcctctccgagctcggcgtccgccagtggcccaagtgggggtgcgagaagagcaagttcccgtggacctactccgccaaggagacgtgctacctgctgcaggggaaggtgaaggtgtaccccgaaggccacggggaggagttcgtggagatcggcgcgggagaccttgtcgtcttccccaagggcatgagctgcacctgggacgtcgccgaggccgtcgacaagcactacaacttcgagtagccgccgccgccgactagccctgcggcgctcgatgtagacttgctgtgctcttgtactctgaaccaccgtgtaataaagctccggattagggtactaaaaaaaaaaaaaaaa

SEQ ID NO: 10928 - protein, 140 aa, Zea mays; identical to SEQ ID NO: 9478
  misc_feature: Ceres CLONE ID no. 1691990
  misc_feature: Ceres CDNA ID no. 35383545
  misc_feature: Homolog of GI Number: 50924572 NR Desc: OSJNBa0027P08.10
  misc_feature: Homolog of GI Number: 50926366 NR Desc: OSJNBb0065L13.6

SEQ ID NO: 10929 - DNA, 717 bp, Zea mays
  misc_feature: Ceres CLONE ID no. 1692117
  misc_feature: Ceres CDNA ID no. 36707612
  CDS (287)..(544): REFERENCED BY SEQ ID NO: 10930
atctctagtctttgcacgcgcatgcagtcgtccaccgccaactgttttctgacacgtggagttgaatgccactgatactgatcgaccaggcgcgcacacgatcggcatcgcgcactgctcctccttcgcggaccgcctgtacggctacccaggcggcggcgttggcgcggccgggaacgacacggccgaggccgacccggccctggacgcgacctacgcggccaacctgcggaggcgcaagtgccgggcggcgagcggcgggtacgcggaggacggcgtggtggagatggacccgggcagccacctgacgttcgacctgggctactaccgcgcgctgctcaagcgcaggggcctgctccgctccgacgccgcgctgctcaccgacgcggcggcgcgcgccgacgtcgagggcgtcgcggccgggcccgaggaggtcttcttccagctgttcgcgcggtccatggccaggctggcggcgctgcaggtcaagaccggcgccgagggggaggtcaggaggaactgcgctgtcgtcaacggcggctaatgcatgtagcttcttgcctttcttcttctttcccgtttttttcccctttccatcgtagctcccttcatggccattactgctagcgaatactgtgattttgctcttgcatttgggtgcttcacgctcgggtgcaattatcatgtcaaaaaaattgttaaaaaaaaaaaaaaaaa

SEQ ID NO: 10930 - protein, 85 aa, Zea mays
  misc_feature: Ceres CLONE ID no. 1692117
  misc_feature: Ceres CDNA ID no. 36707612
  misc_feature (1)..(46): Pfam Name: peroxidase PFAM Desc: Peroxidase
  misc_feature: Homolog of GI Number: 55700915 NR Desc: TPA: class III peroxidase 24 precursor
  misc_feature: Homolog of GI Number: 50905409 NR Desc: putative peroxidase
  misc_feature: Homolog of GI Number: 55701045 NR Desc: TPA: class III peroxidase 89 precursor
  misc_feature: Homolog of GI Number: 52076880 NR Desc: putative peroxidase
  misc_feature: Homolog of GI Number: 51511062 NR Desc: peroxidase a
  misc_feature: Homolog of GI Number: 7267828 NR Desc: peroxidase ATP19a
  misc_feature: Homolog of GI Number: 1546692 NR Desc: peroxidase
  misc_feature: Homolog of GI Number: 7259219 NR Desc: peroxidase
  misc_feature: Homolog of GI Number: 678547 NR Desc: peroxidase
  misc_feature: Homolog of GI Number: 50261255 NR Desc: CBRCI35
MDPGSHLTFDLGYYRALLKRRGLLRSDAALLTDAAARADVEGVAAGPEEVFFQLFARSMARLAALQVKTGAEGEVRRNCAVVNGG

SEQ ID NO: 10931 - DNA, 695 bp, Zea mays
  misc_feature: Ceres CLONE ID no. 1692176
  misc_feature: Ceres CDNA ID no. 40352087
  CDS (114)..(473): REFERENCED BY SEQ ID NO: 10932
actacccctacccgcgacttcgctcagcttccgccgatcggcttgccccgtcgatttcgccaacccctcgacccgatcggctccattgatcgtacctcgtcgtccggttgtcgatggccaggacctctttcaaaatggagcacgacctcgagaaaaggcagtccgaatctgccaggatcagggataagtatcccgacagaattcctgtgattgttgagaaagctggcaaaactgatgtccccgagattgataagaagaagtaccttgtccctgctgatctcactgtcggccagtttgtctatgtggtgaggaagagaatcaagctgagcccagagaaggccatctttgtctttgtgaagaacaccttgccaccaactgcctctttgatgtctgcaatctacgaagagaacaaggacgaggatggcttcctttacatgacctacagtggtgaaaacaccttcggctctgcctagagcaatcgcccctgccactgtaaataaacgagcatgatggggctgctgctattgtaaacctgtgtatatacctcagtctctagtatgctgctgccggattgcttcaatggcttcaatgacacccttagctttcaactgtttggatttctcctgtgacattgaattccttcggtatcgaaacatttgatcatttcactattacttcaaaaaaaaaaaaaaaaa

SEQ ID NO: 10932 - protein, 119 aa, Zea mays
  misc_feature: Ceres CLONE ID no. 1692176
  misc_feature: Ceres CDNA ID no. 40352087
  misc_feature (14)..(117): Pfam Name: MAP1_LC3 PFAM Desc: Microtubule associated protein 1A/1B
MARTSFKMEHDLEKRQSESARIRDKYPDRIPVIVEKAGKTDVPEIDKKKYLVPADLTVGQFVYVVRKRIKLSPEKAIFVFVKNTLPPTASLMSAIYEENKDEDGFLYMTYSGENTFGSA

SEQ ID NO: 10933 - DNA, 566 bp, Zea mays
  misc_feature: Ceres CLONE ID no. 1692409
  misc_feature: Ceres CDNA ID no. 36706903
  CDS (326)..(505): REFERENCED BY SEQ ID NO: 10934
actcgctacttaattttcagtgctaaactctactgcctatatggaaagtacgcggggcactattgcttagtttgcctcagactcatcacactagaaaagctctggtgctactgttctagctagcactacagtgtacactggaaagctcccgagtgttgtttcttcgtgtcctgttgttgtcaagggagacagtacagtttcttgatggatcaagatgccctacgtcaacaagaaggagagggagcacgaactgagcagaaggaagcgctagtgccactggtgcaagctcggcggctcagcgtcaagacgaacgattacagcagctatgacccttccccgtccatggacaagccacactccaagctcataccgaactgatcaatcatgtacccgtccaggttgcagcagtcgagttgccgatgagaaatttaacagcttaaatgtgtgcctgatttatatatacagaagcattatattactaggcttgcttaaactgttctcatgacatctaatatcatattattatagatgtgacatatagatgtttacctaaaaaaaaaaaaaaa

SEQ ID NO: 10934 - protein, 57 aa, Zea mays
  misc_feature: Ceres CLONE ID no. 1692409
  misc_feature: Ceres CDNA ID no. 36706903
MDQDALRQQEGEGARTEQKEALVPLVQARRLSVKTNDYSSYDPSPSMDKPHSKLIPN

SEQ ID NO: 10935 - DNA, 527 bp, Zea mays
  misc_feature: Ceres CLONE ID no. 1692449
  misc_feature: Ceres CDNA ID no. 36707480
  CDS (87)..(296): REFERENCED BY SEQ ID NO: 10936
atagtctccgcatttccatcctgtcgtgggatcccagccaccgccgctagaagaagagctcggcgattcccaggtcccgcgagaatatgccgaagcagatccatgagattaaggacttcctcctcaccgcgaggaggaaggatgcccgctcagtgaagatcaagaggagtaaggatgttgtcaagttcaaggtgcgctgctccaagtacttgtacacgctctgcgtcttcgatgctgagaaggcaaacaagttgaagcaatctcttcccccaggtttgaccgtcgaggaggtctgattggatacatggcaacgccgagttgaactacccaagcttctttatcagtagcagagcatgctactctatgtacttttggaacctaagctattagacctgtcagtgttggatgtctggatcttgcatttttggagaaataccaatttacctcgttcaaggatgcaagtatatttcttgtttaactgcacattactttatatttatgcctgtttcataaaaaaaaaaaaaaaa

SEQ ID NO: 10936 - protein, 69 aa, Zea mays; identical to SEQ ID NO: 56
  misc_feature: Ceres CLONE ID no. 1692449
  misc_feature: Ceres CDNA ID no. 36707480
  misc_feature (2)..(69): Pfam Name: Ribosomal_L38e PFAM Desc: Ribosomal L38e protein family
  misc_feature: Homolog of GI Number: 50938225 NR Desc: putative 60S ribosomal protein L38
  misc_feature: Homolog of GI Number: 23507773 NR Desc: At3g59540/T16L24_90
  misc_feature: Homolog of GI Number: 50931949 NR Desc: putative 60S ribosomal protein L38
  misc_feature: Homolog of GI Number: 313027 NR Desc: ribosomal protein L38
  misc_feature: Homolog of GI Number: 15825507 NR Desc: ribosomal protein L38
  misc_feature: Homolog of GI Number: 27497793 NR Desc: 60S ribosomal protein L38
  misc_feature: Homolog of GI Number: 49900028 NR Desc: MGC89823 protein
  misc_feature: Homolog of GI Number: 82895480 NR Desc:  similar to ribosomal protein L38
  misc_feature: Homolog of GI Number: 4506645 NR Desc: ribosomal protein L38
  misc_feature: Homolog of GI Number: 61372160 NR Desc: ribosomal protein L38

SEQ ID NO: 10937 - DNA, 2029 bp, Zea mays
  misc_feature: Ceres CLONE ID no. 1693671
  misc_feature: Ceres CDNA ID no. 36703655
  CDS (42)..(1814): REFERENCED BY SEQ ID NO: 10938
aatataccactccacaatcacacatttgacaccgccaatccatggccttggcgacgccgctgcggctccgccgccacctcctcctccccgccgggccgtccccggcgacccaccgcgccctgtcgctgcggcggggccgcctcctccccgcaagcctgtcgtccgccgcggcgggcgggcggccgacggtgctggtgacggagacgctgggttccgcggggctggacctgctgcgcgccttcgccaacgtggactgctcctacgagctgacggcggaggagctccgcgccaaggtgtcgctcgtggacgcgctggtggtgcgcagcgggacgcaggtgacgcgggaggtgttcgaggccgcgcgcggcaggctccgtgtcgtcgggcgcgccggggtcggcatcgacaatgtggacctccaggcggccaccgaagccggctgcctcgtcgtcaacgcgcccaccgccaacaccgtcgccgccgccgagcacgccgtcgcgctcctcgccgccgtggcgcgcaatatcgcgccggccgacgcgtcgctcaaggccggcaaatggcagcggggcaagtatgttggtgttaccttggtgggcaagacgctagccgtcatgggtttcggcaaggtcggtccagaggtggctcgacgcgcgagaggactcgggatggacgtcgtcgcccacgacccatacgctgccgccgatcgagcccgggcggtcggcgtcgacctggtgtcgtttgacgaggccatctccacggcggacttcatatcgctgcacatgcctctgaccccgtcgacggcgaagcttttcaacgacgagactttcgcgaggatgaggaagggtgtcaggatcatcaacgtttcgcggggcggagtcgtcgacgaggaagcgttgctgagggcacttgacaacggaacagtttcccaggctgcgctcgatgtatttactgaggagccaccgccaagagacagcaagctagtgcagcatgagaatgtcactgtcacaccacaccttggggctagcacaatagaagcgcaggaaggtgtagccctcgaaattgcagaggctgttatcggtgcactgcgaggagacctggctgccacggctgtcaacgccccgatggtccctgccgaggttctatccgagttatctccatacattgtccttgcggagaagctgggccggctggtggttcagctggtggccgttggcagcgggatcaaaggcgtcagggtggtctactcgtccgccagagaccctgacgacctggacacgagactcctccgcgccatggtcaccaagggcatcgtggagccgatctcgagcgccttcgtcaacatcgtcaacgcggactacgtcgcgaagcagcgaggcctcaggatcgtggaggagagggtcttcctcgacggcccgcccgaggtcccgctcgactccatccaggtccatctcgccaacgtggagtccaagttcgccggagccctgtccgacgcgggccacatctgcgtggagggcaaggtcagggacggcggcgcgtcgcacctcacgctcgtcgggtccttgagcgtcgacgttagccttgagggcaacctgatactgtgcggccagctcgaccacccgggcatcattgggagagtggggtcgatcctgggaaagatgaacgtgaacgtgagctttatgagcgtcagtaggactgctcccgggaagcaggcgataatggccattggagtcgacgaggagcctgggaaggaagctctcaaattgatcggtgacacgccgtctgttgaggagtttgtctttcttaagctatagagactgaggaagtaggttaggggacccaaaattacatttgtacgtgctatagtagcgtgagattgatgttgttgccatgattttagtagctagcccggggtactttatgctttgtgtacttgaggacacgccgccggtcacaaatactaatagtaatatatcaagggatacatgcaaaatgcagttttccgtgggcctaaaaaaaaaaaaaaaaa

SEQ ID NO: 10938 - protein, 590 aa, Zea mays
  misc_feature: Ceres CLONE ID no. 1693671
  misc_feature: Ceres CDNA ID no. 36703655
  misc_feature (152)..(323): Pfam Name: 2 PFAM Desc: D
  misc_feature (48)..(141): Pfam Name: 2 PFAM Desc: D
  misc_feature (517)..(590): Pfam Name: ACT PFAM Desc: ACT domain
  misc_feature: Homolog of GI Number: 50929221 NR Desc: OSJNBb0059K02.15
  misc_feature: Homolog of GI Number: 21536501 NR Desc: Phosphoglycerate dehydrogenase
  misc_feature: Homolog of GI Number: 21554130 NR Desc: Phosphoglycerate dehydrogenase
  misc_feature: Homolog of GI Number: 14596141 NR Desc: phosphoglycerate dehydrogenase
  misc_feature: Homolog of GI Number: 11994471 NR Desc: phosphoglycerate dehydrogenase
  misc_feature: Homolog of GI Number: 51536377 NR Desc: putative D
  misc_feature: Homolog of GI Number: 23297595 NR Desc: putative phosphoglycerate dehydrogenase
  misc_feature: Homolog of GI Number: 50946295 NR Desc: putative phosphoglycerate dehydrogenase
  misc_feature: Homolog of GI Number: 68212160 NR Desc: D
  misc_feature: Homolog of GI Number: 78703468 NR Desc: D
MALATPLRLRRHLLLPAGPSPATHRALSLRRGRLLPASLSSAAAGGRPTVLVTETLGSAGLDLLRAFANVDCSYELTAEELRAKVSLVDALVVRSGTQVTREVFEAARGRLRVVGRAGVGIDNVDLQAATEAGCLVVNAPTANTVAAAEHAVALLAAVARNIAPADASLKAGKWQRGKYVGVTLVGKTLAVMGFGKVGPEVARRARGLGMDVVAHDPYAAADRARAVGVDLVSFDEAISTADFISLHMPLTPSTAKLFNDETFARMRKGVRIINVSRGGVVDEEALLRALDNGTVSQAALDVFTEEPPPRDSKLVQHENVTVTPHLGASTIEAQEGVALEIAEAVIGALRGDLAATAVNAPMVPAEVLSELSPYIVLAEKLGRLVVQLVAVGSGIKGVRVVYSSARDPDDLDTRLLRAMVTKGIVEPISSAFVNIVNADYVAKQRGLRIVEERVFLDGPPEVPLDSIQVHLANVESKFAGALSDAGHICVEGKVRDGGASHLTLVGSLSVDVSLEGNLILCGQLDHPGIIGRVGSILGKMNVNVSFMSVSRTAPGKQAIMAIGVDEEPGKEALKLIGDTPSVEEFVFLKL

SEQ ID NO: 10939 - DNA, 769 bp, Zea mays
  misc_feature: Ceres CLONE ID no. 1695528
  misc_feature: Ceres CDNA ID no. 40041573
  CDS (90)..(563): REFERENCED BY SEQ ID NO: 10940
agtgctctctcagaggtgggctggcttctcctccccctcttaccaagtcctcctcgggttagggttccttagggttttgtggaggggcgatggcggcggctgatgtggagtaccgttgcttcgtcggcgggcttgcctgggccaccagcaacgagtcgctggagaatgccttcgcctcctacggcgagatcctcgactccaaggtcatcaccgaccgggagacggggaggtctcgcggcttcggcttcgttaccttctcctccgagaactccatgctcgacgctatcgagaacatgaacggcaaggagctcgacggccgtaacatcaccgttaaccaggcccagtcccgtggcggtggcggtggcggcggtggctacggcggcggtcgcggcggcggcggctatggtggcgggcgccgtgacggcggttatggcggcggtggcggctacggcggtcggcgcgagggtggtggcggcggctacggaggcggtggcggctacggcggtcggcgcgagggtggtggtggcggctacggcggcggcggcggcggctggagggactgatgtgtgggcccatcctggcttcggccgagttatcttatctatctatagtatcgtgttaccgttcgcttctgtcaccgtgttagtgtccgttctacctttggattaggtgttggtacccctgttgttccctttgtttgctcccgctatgaaacgagacgagagaagaatgagcaaggtttttgttcgctaaaaaaaaaaaaaaaaaa

SEQ ID NO: 10940 - protein, 157 aa, Zea mays; identical to SEQ ID NO: 156
  misc_feature: Ceres CLONE ID no. 1695528
  misc_feature: Ceres CDNA ID no. 40041573
  misc_feature (10)..(81): Pfam Name: RRM_1 PFAM Desc: RNA recognition motif.
  misc_feature: Homolog of GI Number: 22313 NR Desc: ABA
  misc_feature: Homolog of GI Number: 10799202 NR Desc: glycine
  misc_feature: Homolog of GI Number: 21625 NR Desc: glycine
  misc_feature: Homolog of GI Number: 50881454 NR Desc: glycine
  misc_feature: Homolog of GI Number: 18347 NR Desc: glycine
  misc_feature: Homolog of GI Number: 2331131 NR Desc: glycine
  misc_feature: Homolog of GI Number: 2331133 NR Desc: glycine
  misc_feature: Homolog of GI Number: 77557139 NR Desc: glycine
  misc_feature: Homolog of GI Number: 22293 NR Desc: glycine
  misc_feature: Homolog of GI Number: 2267593 NR Desc: glycine
  misc_feature: Useful for delaying flowering time
  misc_feature: Useful for increasing chlorophyll and photosynthetic capacity
  misc_feature: Useful for making bigger plants
  misc_feature: Useful for making ornamental plants with modified flowers
  misc_feature: Useful for making plants with increased biomass and foliage
  misc_feature: Useful for making plants with increased biomass and foliage
  misc_feature: Useful for making plants with increased biomass and foliage
  misc_feature: Useful for making shorter plants
  misc_feature: Useful for making stronger plants
  misc_feature: Useful for sterility

SEQ ID NO: 10941 - DNA, 692 bp, Zea mays
  misc_feature: Ceres CLONE ID no. 1695780
  misc_feature: Ceres CDNA ID no. 36707481
  CDS (69)..(548): REFERENCED BY SEQ ID NO: 10942
atcttgctctgaacgcattcctcccatctcccaagacctcctcagacccgagaagcgcggctgcggccatggacgccaccggcactggagctggagggaaggcgaagaagggagcggccggtcgcaaggccggcgggccgaggaagaagtcggtgacgaggtccgtgaaggccgggctccagttccccgtcggccgcatcgggcgctacctcaagaagggccgctacgcgcagcgcgtcggcagcggtgcccccgtctacctcgcggccgtcctggagtacctcgccgctgaggtcctggagctcgccggcaacgctgccaaggacaacaagaagacgcgcatcgtcccgcgccacgtgctgctggcgatccgcaacgacgaggagctcgggaagctgctgaccggcgtgaccatcgcccacggcggcgtgttgcccaacatcaacccggtcctgctgcccaagaagacggcggagaaggcgtccagcggcgggagcaaggaggccaagtcgcccaagaaggccgccaagtcccccaagaaggcatagggtttggaggcggatccgatgttgtcatgtgtaggttgtaagcgggcaatgtgattgactgtgtatctgcttcgctcaagttgctttatgtcattcctaatggaataggaaatgccgtgtttccaaaaaaaaaaaaaaaaaaaa

SEQ ID NO: 10942 - protein, 159 aa, Zea mays; identical to SEQ ID NO: 10436
  misc_feature: Ceres CLONE ID no. 1695780
  misc_feature: Ceres CDNA ID no. 36707481
  misc_feature (37)..(101): Pfam Name: CBFD_NFYB_HMF PFAM Desc: Histone
  misc_feature: Homolog of GI Number: 729671 NR Desc: Histone H2A
  misc_feature: Homolog of GI Number: 34914498 NR Desc: putative histone H2A
  misc_feature: Homolog of GI Number: 47026912 NR Desc: histone H2A
  misc_feature: Homolog of GI Number: 121982 NR Desc: Histone H2A.2.2
  misc_feature: Homolog of GI Number: 7649159 NR Desc: histone H2A
  misc_feature: Homolog of GI Number: 47026919 NR Desc: histone H2A
  misc_feature: Homolog of GI Number: 121974 NR Desc: Histone H2A.2.1
  misc_feature: Homolog of GI Number: 122006 NR Desc: Histone H2A
  misc_feature: Homolog of GI Number: 68441405 NR Desc:  similar to histone H2A
  misc_feature: Homolog of GI Number: 61826353 NR Desc:  similar to Histone H2A.x

SEQ ID NO: 10943 - DNA, 480 bp, Zea mays
  misc_feature: Ceres CLONE ID no. 1695835
  misc_feature: Ceres CDNA ID no. 36706904
  CDS (207)..(359): REFERENCED BY SEQ ID NO: 10944
gcgttcttcgctgcatctggttcttctcggactccgccgctccccccgcagacgcaagaaactgctggccatggagcccccatccgcccaggcgatgtccgcgactgacgacttccaggacaaggccgtcgacgagtgttgctcttgctgctacgattgctgctccagcatcctggacttcctgtgctgctcgtcctgatcgatcgatgcctgccctttcgacggccccgtggaatttctcagggaaccggaggccttaccgtggcccactgatcttggattctagatgccgtgggattcgtgtgttctttaggtccttcggtgacgatgtttgtaatccggattcgaatcatcggtaacagtaaaggaaacttgatagactgctgaacagccgagttatcttcaaccctgcggtgtgtttcctctgataaagcttttctgcgcgtttgcagatcgatacaaaaaaaaaaaaaaaaaaaa

SEQ ID NO: 10944 - protein, 50 aa, Zea mays
  misc_feature: Ceres CLONE ID no. 1695835
  misc_feature: Ceres CDNA ID no. 36706904
MPALSTAPWNFSGNRRPYRGPLILDSRCRGIRVFFRSFGDDVCNPDSNHR

SEQ ID NO: 10945 - DNA, 448 bp, Zea mays
  misc_feature: Ceres CLONE ID no. 1696096
  misc_feature: Ceres CDNA ID no. 29191594
  CDS (87)..(227): REFERENCED BY SEQ ID NO: 10946
ggcagtcttcagcacgcacaccaatcgcccacaagcgctcgcaggagaggtcgaaaccctagcttttgcggcggcggcgagagaagatgatctacgacgtgaactcccccctcttccgttccttcctcagccagaagggcggcgccgacaagaggaaaatggaggagcataaaccaaaggagcagaggcccaaggctaacgagaacaagcctgtgatgaacgaatgaatatctccagaagctttgttcaatgtgcaaccaagtccgatgtccgtttgctctggtcagcttaaaaccaacgcttccaataatcctatattggtgacttagtttccccttatagtgttatttgctcggcttgaacatggcaacggaaatgaaacttgaactacctatggtactgtcatcaatttgagactcccatggttggcaaaaaaaaaaaaaaaaaa

SEQ ID NO: 10946 - protein, 46 aa, Zea mays
  misc_feature: Ceres CLONE ID no. 1696096
  misc_feature: Ceres CDNA ID no. 29191594
  misc_feature (1)..(46): Pfam Name: Wound_ind PFAM Desc: Wound
  misc_feature: Homolog of GI Number: 81888 NR Desc: wound
  misc_feature: Homolog of GI Number: 6642642 NR Desc: putative wound
MIYDVNSPLFRSFLSQKGGADKRKMEEHKPKEQRPKANENKPVMNE

SEQ ID NO: 10947 - DNA, 653 bp, Zea mays
  misc_feature: Ceres CLONE ID no. 1696852
  misc_feature: Ceres CDNA ID no. 40352088
  CDS (70)..(459): REFERENCED BY SEQ ID NO: 10948
ttcctcggagagggagaagccgccgccgcagcaatcacagcagcccggagaaagcccaggtccgacaagatgcagatcttcgtgaagacgctgacagggaagaccatcaccctcgaggtcgagagcagcgacaccatcgacaatgtcaaggccaagatccaggacaaggaagggatcccgccggaccagcagcggctgatctttgccgggaagcagctggaggatggccgcacccttgcggactataacatccaaaaggagtctacgcttcacctcgtgcttaggctccgcggtggcatcattgagccctcgctgcaggcgctcgctcgcaagtacaaccaggacaagatgatctgccgcaaatgctatgcacgactgcaccctagggctgtcaactgccgcaagaagaagtgtggtcacagcaaccagctgagggccaagaagaagatcaagaactgaggtgctgctcctagtcagtttcatggacaatgttgggctgtattgctgtgtggttgttgaaccgtgtttgtttacccaacatttgggccttctgttatgttttaccttgttgtcgatgacacaatactatatgacaatagcaactctgttattgtagttttggtcactgttcgcaaaaaaaaaaaaaaaaaaaa

SEQ ID NO: 10948 - protein, 129 aa, Zea mays; identical to SEQ ID NO: 434
  misc_feature: Ceres CLONE ID no. 1696852
  misc_feature: Ceres CDNA ID no. 40352088
  misc_feature (1)..(74): Pfam Name: ubiquitin PFAM Desc: Ubiquitin family
  misc_feature (77)..(128): Pfam Name: Ribosomal_L40e PFAM Desc: Ribosomal L40e family

SEQ ID NO: 10949 - DNA, 713 bp, Zea mays
  misc_feature: Ceres CLONE ID no. 1696855
  misc_feature: Ceres CDNA ID no. 36706871
  CDS (79)..(585): REFERENCED BY SEQ ID NO: 10950
aagctttttatccactcccacagtccaatccacacgaccgccaccaactcacgcagcgtgcttcccttcagaaactcgatggcctgccacctcgccatcgccggcgccaccgccgccgccgcccgcgctcctcgtatctccgtgctcgccgccgcctctgcttcctccgcaggggaacccgcgcgccgcatcatccgccgccgcgcgccgccgggtcagcagggctctgccacagcggcccccgcgcctcccgcccagccgtccgtggcggaggtgcgccgcgccatcggcgtctccgacgacgctgcgtcggccgccgcatccatggagaagaagaacaccgcgttcatggacctcatctctaccacgcccatcggccagccggagagcgagcccgagcgccgcctccgcgaggccgccgagtgggtagtcgacaccactgagacgcgcgcttgcgaaggacagaagtctttcttagtgctatgcatgatgacatttcctgcttggttcttgctcctgtttcttgcccttggactctttaagttaccatttgatattccggttctggataatctcctaatgtaaggtgttagctattatcatttttcccttttattttccaaatatacgagcttcacacactgaatatgaaaagaaatatatgccactactgaaaaaaaaaaaaaaaaaaaaaaaaaaaaaaaaaaaaaaaa

SEQ ID NO: 10950 - protein, 168 aa, Zea mays
  misc_feature: Ceres CLONE ID no. 1696855
  misc_feature: Ceres CDNA ID no. 36706871
  misc_feature: Homolog of GI Number: 6523547 NR Desc: hydroxyproline
  misc_feature: Homolog of GI Number: 7441829 NR Desc: proline
  misc_feature: Homolog of GI Number: 7441828 NR Desc: extensin
  misc_feature: Homolog of GI Number: 57899154 NR Desc: putative receptor protein kinase PERK1
  misc_feature: Homolog of GI Number: 67987177 NR Desc: 4Fe
  misc_feature: Homolog of GI Number: 21992 NR Desc: extensin
  misc_feature: Homolog of GI Number: 21355745 NR Desc: CG15021
  misc_feature: Homolog of GI Number: 34894174 NR Desc: putative LRR receptor
  misc_feature: Homolog of GI Number: 62421765 NR Desc: 120 kDa pistil extensin
  misc_feature: Homolog of GI Number: 45190779 NR Desc: AER176Wp
MACHLAIAGATAAAARAPRISVLAAASASSAGEPARRIIRRRAPPGQQGSATAAPAPPAQPSVAEVRRAIGVSDDAASAAASMEKKNTAFMDLISTTPIGQPESEPERRLREAAEWVVDTTETRACEGQKSFLVLCMMTFPAWFLLLFLALGLFKLPFDIPVLDNLLM

SEQ ID NO: 10951 - DNA, 752 bp, Zea mays
  misc_feature: Ceres CLONE ID no. 1697733
  misc_feature: Ceres CDNA ID no. 40041574
  CDS (134)..(445): REFERENCED BY SEQ ID NO: 10952
agagacttgtaactgtagaggacgaagcccttagctctgggcattatatatacatatccactcctgctctggtctctcgcaaccaccgtgcgcgcatcaactcggcacaaccggtgagtcttctgcatcttcgatggagaaccagggacccaaacccatccgatgcaaagcggccgtgtgcagggccgccggcgagccgctggccatcgaggaggtcgtcgttgacacgcccaaggcgcacgaggtcaggatacggatcatctgcacgtcgctctgccacagcgacgtcacgttctggcgcatgaaggatctccctgacaatatccccagaatatttggccacgaagccttcgggtatcaatcttcacctcgattcgactctatgtcgtctaaagacgtcttggatgacctgccgacctcaagatgcactaggatctttccctgacgatgctcttcccggggcgagatccaagttctgcaggaggctctcttcgtcatcatggacggttcgttgcctactcgtgaaaggtccgatgacctaacgcgaaccgcacctcgcagagccgaacccacggtcctgcacatcacgtgaaggtcctagtgttcgtttctattggtcctaagaaggtgccaacataaaggtggagtccaagactgcattgcaggtagtgttatttgtcttgtgaccaacaatggaccgtctggtgatctatcatggatggtttgttgcctcgcaaaaaaaaaaaaaaaaa

SEQ ID NO: 10952 - protein, 103 aa, Zea mays
  misc_feature: Ceres CLONE ID no. 1697733
  misc_feature: Ceres CDNA ID no. 40041574
  misc_feature: Homolog of GI Number: 34902440 NR Desc: Putative alcohol dehydrogenase
  misc_feature: Homolog of GI Number: 7705214 NR Desc: alcohol dehydrogenase ADH
  misc_feature: Homolog of GI Number: 7705215 NR Desc: alcohol dehydrogenase  ADH
  misc_feature: Homolog of GI Number: 34902442 NR Desc: Putative alcohol dehydrogenase
  misc_feature: Homolog of GI Number: 22136298 NR Desc: alcohol dehydrogenase
  misc_feature: Homolog of GI Number: 51972064 NR Desc: At1g22440
  misc_feature: Homolog of GI Number: 79318344 NR Desc: oxidoreductase/ zinc ion binding
  misc_feature: Homolog of GI Number: 34906828 NR Desc: putative alcohol dehydrogenase
  misc_feature: Homolog of GI Number: 21618210 NR Desc: alcohol dehydrogenase
  misc_feature: Homolog of GI Number: 18415840 NR Desc: alcohol dehydrogenase
MENQGPKPIRCKAAVCRAAGEPLAIEEVVVDTPKAHEVRIRIICTSLCHSDVTFWRMKDLPDNIPRIFGHEAFGYQSSPRFDSMSSKDVLDDLPTSRCTRIFP

SEQ ID NO: 10953 - DNA, 480 bp, Zea mays
  misc_feature: Ceres CLONE ID no. 1697864
  misc_feature: Ceres CDNA ID no. 36707337
  CDS (151)..(327): REFERENCED BY SEQ ID NO: 10954
atgttagctgccattcatgtccttcatttttttttctaggtgttttattttaaatgtgatagttgtatcaagttcgaaaaagatgcttcttacagctattcttcttttcgattcatcagtttcgtttcttcctgcagcaccatcacagtgatgacatccttggtggccctttcattctacggtgctagccagatcaagttccactgggtggagcgttacgacaagatcctcgtcggcacggtgctgtgccttgttggagtcttaacatatgtgttccatcatcacgatggtgatgagcatgtgcaccagaaactcgtatctccctagatgcatacatactgaagttccatctctgttgctccctatttgtatacaatcctgattatcgacttactctgccgctctggttttgctggagatacgtatcatctgatcaagtgaatatatttgagcaaactgcgtcaaaaaaaaaaaaaaaaa

SEQ ID NO: 10954 - protein, 58 aa, Zea mays
  misc_feature: Ceres CLONE ID no. 1697864
  misc_feature: Ceres CDNA ID no. 36707337
MTSLVALSFYGASQIKFHWVERYDKILVGTVLCLVGVLTYVFHHHDGDEHVHQKLVSP

SEQ ID NO: 10955 - DNA, 746 bp, Zea mays
  misc_feature: Ceres CLONE ID no. 1698091
  misc_feature: Ceres CDNA ID no. 36706732
  CDS (3)..(569): REFERENCED BY SEQ ID NO: 10956
aagggaaagggaagcgaatcaaagcgcgctcgacaagccttccaagtacagactacagagcagggcagggcagggagacggcgggcgatggggatgagcctcgcccaggcggtggcggcgctggtgggcacgtgcgcgcggcgcctgtcgcgggcggcgcgccgcctgcgcccgcgggacggggtcgcggcgtccttctcgtcccgcgccatcgtgccgttcctcggcggcggcggcggcgggggcgtcaagaagtcgctctcatcttcctcctcctcctcgccgtccaagtcgaagaggaggaaggcggcgccgaaggaggaggaggaggcgggggacgggctgtggcggagggagatcatgatgggggagcggtgccagccgctggacttctccggggtcatctactacgacgcccaaggccgacgcctcgcgcaggcgccgccgccgcgctcgccgctccgcagcccgctgccggcctccgtcaagctcgccgccaacgccgcgtactagctacggatgggactgggaggagtcctccgttttcttcccggcctgctgctagctagtgacagtgtaaatggtttccttgccgcttgccgtctgcttctcctcctcctcctccttgacgttggtagtacttgctattaataataggtttcccttgtcctttggccctgtgtagcgaatttgcgattaaacgagggcatcccctacacctacagtttcgaaaaaaaaaaaaaaaa

SEQ ID NO: 10956 - protein, 141 aa, Zea mays
  misc_feature: Ceres CLONE ID no. 1698091
  misc_feature: Ceres CDNA ID no. 36706732
  misc_feature: Homolog of GI Number: 34914912 NR Desc: B1096D03.21
  misc_feature: Homolog of GI Number: 34912466 NR Desc: P0704D04.7
MGMSLAQAVAALVGTCARRLSRAARRLRPRDGVAASFSSRAIVPFLGGGGGGGVKKSLSSSSSSSPSKSKRRKAAPKEEEEAGDGLWRREIMMGERCQPLDFSGVIYYDAQGRRLAQAPPPRSPLRSPLPASVKLAANAAY

SEQ ID NO: 10957 - DNA, 615 bp, Zea mays
  misc_feature: Ceres CLONE ID no. 1698450
  misc_feature: Ceres CDNA ID no. 36707615
  CDS (207)..(476): REFERENCED BY SEQ ID NO: 10958
aagacacagcagcagccagcaggaacacagagatcatatcatcggccggggcagcacgttcacgttgaccgccagagctcaaacacaacagccgtcagccagaaatcatcaggaggtggtgaccgctgaggagagttcattcaggccgtgcaagagctgagggaaaaataaaacatcgatccatccttcccatcggtcggccaatcatgattctgggcttgggaggatgctgcggcgctgcggccgtcgccgccgccgtatcggcttctgccgtcggtaaggaatcaggaggtcatctagaagctgacaagcggcagcagaagcagggggcaggtgaggagaagatgaacaagggaggcgaccagggagcagcagcagcgggcggcaaggagaggagcaagagaagggatcatcacaaggctcccccgatcgttgtgcatcagttccccttccactctcgccccggcttgctctgaattcctctacttctcttggtgtgagtgtgtgtgagtagtctgtgatcctgtaattattcaggttctcgtgtgtcgtccattgagatatacttatatactatataagaaacaatccatttcccaaaaaaaaaaaaaaaaa

SEQ ID NO: 10958 - protein, 89 aa, Zea mays
  misc_feature: Ceres CLONE ID no. 1698450
  misc_feature: Ceres CDNA ID no. 36707615
MILGLGGCCGAAAVAAAVSASAVGKESGGHLEADKRQQKQGAGEEKMNKGGDQGAAAAGGKERSKRRDHHKAPPIVVHQFPFHSRPGLL

SEQ ID NO: 10959 - DNA, 676 bp, Zea mays
  misc_feature: Ceres CLONE ID no. 1700842
  misc_feature: Ceres CDNA ID no. 36707488
  CDS (59)..(538): REFERENCED BY SEQ ID NO: 10960
gaacgcattcctcccatctcccaagacctcctcagacccgagaagcgcagctgcggccatggacgccaccggcactggagctggagggaaggcgaagaagggagcggccggtcgcaaggccggcgggccgaggaagaagtcggtgacgaggtccgtgaaggccgggctccagttccccgtcggccgcatcgggcgctacctcaagaagggccgctacgcgcagcgcgtcggcagcggtgcccccgtctacctcgcggccgtcctggagtacctcgccgctgaggtcctggagctcgccggcaacgctgccaaggacaacaagaagacgcgcatcgtcccgcgccacgtgctgctggcgatccgcaacgacgaggagctcgggaagctgctgaccggcgtgaccatcgcccacggcggcgtgttgcccaacatcaacccggtcctgctgcccaagaagacggcggagaaggcgtccagcggcgggagcaaggaggccaagtcgcccaagaaggccgccaagtcccccaagaaggcatagggtttggaggcggatccgatgttgtcatgtgtaggttgtaagcgggcaatgtgattggctgtgtatctgcttcgctcaagttgctttatgtcattcctaatggaataggaaatgccgtgtttagaaaaaaaaaaaaaa

SEQ ID NO: 10960 - protein, 159 aa, Zea mays; identical to SEQ ID NO: 10436
  misc_feature: Ceres CLONE ID no. 1700842
  misc_feature: Ceres CDNA ID no. 36707488
  misc_feature (37)..(101): Pfam Name: CBFD_NFYB_HMF PFAM Desc: Histone
  misc_feature: Homolog of GI Number: 729671 NR Desc: Histone H2A
  misc_feature: Homolog of GI Number: 34914498 NR Desc: putative histone H2A
  misc_feature: Homolog of GI Number: 47026912 NR Desc: histone H2A
  misc_feature: Homolog of GI Number: 121982 NR Desc: Histone H2A.2.2
  misc_feature: Homolog of GI Number: 7649159 NR Desc: histone H2A
  misc_feature: Homolog of GI Number: 47026919 NR Desc: histone H2A
  misc_feature: Homolog of GI Number: 121974 NR Desc: Histone H2A.2.1
  misc_feature: Homolog of GI Number: 122006 NR Desc: Histone H2A
  misc_feature: Homolog of GI Number: 68441405 NR Desc:  similar to histone H2A
  misc_feature: Homolog of GI Number: 61826353 NR Desc:  similar to Histone H2A.x

SEQ ID NO: 10961 - DNA, 802 bp, Zea mays
  misc_feature: Ceres CLONE ID no. 1700877
  misc_feature: Ceres CDNA ID no. 40352089
  CDS (155)..(577): REFERENCED BY SEQ ID NO: 10962
accctcgaggtggcggcgcgctcctccccttctccttgctactagtccccccccccccccccccccctcaattcgccactgacgttcattccgcttgcttgattgctccaggtacctccattcgcagtcggccgtgtcctcggagccgcgggagatggcggatcaggagacagtagctgtggttgaggcacctaccccggttctaggggaaccgatggacctgatgactgccctgcagctcgtcatgaagaagtcaggtgctcacgatggccttgtgaagggtcttcgtgaggctgccaaagccatcgagaagcatgccgctcagctctgcgtgcttgccgaggactgcgaccagcctgattatgtcaagctggtgaaggctctctgcgctgagcacaatgtccacctggttactgtgcctagcgccaaaactcttggagagtgggctgggctttgcaagatcgactctgagggcaaggcgaggaaggttgtaggctgctcctgtgttgttgtcaaggactacggcgaagaatctgaaggccttaacatagtgcaggagtacgtcaaatcgcactagatacagtctgtcagtatctggaagttgtgttcaacactacattttgcacctgagtttaaatatgtgtttggttcttgggctttgctaggagattagaacagttttcaagtgagcctaggatccacgtgaacgatttgaatatctcgcctcttgcaagtgttctcatctgctgttaatacaaaatcagcaagagctagtattttggaaaaaaaaaaaaaaaaaaaa

SEQ ID NO: 10962 - protein, 140 aa, Zea mays; identical to SEQ ID NO: 4198
  misc_feature: Ceres CLONE ID no. 1700877
  misc_feature: Ceres CDNA ID no. 40352089
  misc_feature (25)..(120): Pfam Name: Ribosomal_L7Ae PFAM Desc: Ribosomal protein L7Ae/L30e/S12e/Gadd45 family

SEQ ID NO: 10963 - DNA, 449 bp, Zea mays
  misc_feature: Ceres CLONE ID no. 1700904
  misc_feature: Ceres CDNA ID no. 35383546
  CDS (75)..(182): REFERENCED BY SEQ ID NO: 10964
gataaccaagaacaaaccattgttggacgcgttcccctcctgcacgcaacctcatctcgtcctccagatccaggatggccgtcctccttgagaccttgcctccccgagtgctctcggtgagctactttgtttcgatttatcaggaaatccgtttgcttcatgttgtgcaggctcatatctgattgctggattcggcaaacccgcgttggatcctgtatcgatctggagaaatcgcgaagtcgtcgtcgttcggttcggagcggatctgaggcgacgatagatggaggcggcgggatctctcggtctgcagtcctgctccacctcgatggatgatgtctctgcgctgataattattggatcaatttcgataattattagtagatctatgagatatgccgcctggaagaggcgaggtaagctgcagcatggaaaaaaaaaaaaaaaaaaaa

SEQ ID NO: 10964 - protein, 57 aa, Zea mays
  misc_feature: Ceres CLONE ID no. 1700904
  misc_feature: Ceres CDNA ID no. 35383546
MLCRLISDCWIRQTRVGSCIDLEKSRSRRRSVRSGSEATIDGGGGISRSAVLLHLDG

SEQ ID NO: 10965 - DNA, 442 bp, Zea mays
  misc_feature: Ceres CLONE ID no. 1701314
  misc_feature: Ceres CDNA ID no. 35383547
  CDS (97)..(252): REFERENCED BY SEQ ID NO: 10966
gtcttctcccctgcgtcaaagacgacgcaagcccttgcctctccctactccaaaccctcgccgactcagatccagcttcctcgcaccgccgtcgccatgccgttcactccaggcctctactctggcgtcagcaccctcgcccttgtggcgagggcgtcggcctttggcgtcggtgtcgtctacgggagcatcaagctctcaatcctaaaggtaacaaaacctaaaaaggaggaagtgcatgatcatcactaaggatgacagggctgctacatgttataaaattggcagtgcaccccttctccatacgtgcaatttcgtttatgatttgtggacctgtctgtaacatacctgctgttttttttgtgttgtaataaattcttatacaatgacatgaaatcaggaagtggaaaaagcaatattaacaaaaaaaaaaaaaaaaaaa

SEQ ID NO: 10966 - protein, 51 aa, Zea mays
  misc_feature: Ceres CLONE ID no. 1701314
  misc_feature: Ceres CDNA ID no. 35383547
  misc_feature: Homolog of GI Number: 50921369 NR Desc: OSJNBb0050O03.8
MPFTPGLYSGVSTLALVARASAFGVGVVYGSIKLSILKVTKPKKEEVHDHH

SEQ ID NO: 10967 - DNA, 520 bp, Zea mays
  misc_feature: Ceres CLONE ID no. 1701496
  misc_feature: Ceres CDNA ID no. 36706905
  CDS (1)..(435): REFERENCED BY SEQ ID NO: 10968
gctgatctttctagaaggattttgcagaaggattttgcttggcatcaaggagcagtgcaaactagaagaaacccccgtcatcagcgacctctccccaacggcgccgacgatggcgcaacagcagacgcagctaaccactggctcgggcatcctggatgccgtcccgctcttcgtcgtcatcctcctcgcggcccacgtcctggccctcgtgttctggatgtacaagctggcttccgagaagcaaccaccccggaggaagacacagtgacggcgccgatctacgccatcggcgatccttcgctagcctctttatcggttccattttcatgtgaaccagtaccctccagaacattcaggccgtcaattattcagagatatccatatagtctttcaatttgttttatttatacttattgcattttgggtattgtttgataacaacttagcgatattctatgaatcactatccgtttgggtgataaataaatgttcctagttacaaaaaaaaaaaaaaaaaaaa

SEQ ID NO: 10968 - protein, 52 aa, Zea mays; identical to SEQ ID NO: 1302
  misc_feature: Ceres CLONE ID no. 1701496
  misc_feature: Ceres CDNA ID no. 36706905

SEQ ID NO: 10969 - DNA, 574 bp, Zea mays
  misc_feature: Ceres CLONE ID no. 1702129
  misc_feature: Ceres CDNA ID no. 36707489
  CDS (126)..(356): REFERENCED BY SEQ ID NO: 10970
gatcgtcccggacggatccatttggctctggtcgtcacaaggttgtttgtgcatcgcggcggcgacaagggggcgacgaggcaggcggagcgggcggcgactacagcggcagcagatctcacggaatggcggcgaaggcaatctcgagccccgtgccggtggagtggtacccgacgctggccgtcgtcatggtatccgtaggcctcatgttcaccgcctccttcttcatttatgaagcaacttcatcccggaggagccgtagcctgtcaaaggagatcgcaacagcagttgttgcttctgttttcttgggctttgggtctctgttcgtgcttcttgcaagtggtgtttatgtctgatgactggctatgggccgtgtgtgcttgtgttctgcatcccgagttgtagacttggttatgacagatcctcaaagctgttgtcctaacgaatatagagcatttgaacttattctagaacgatgtatgggagcaaccgagttaaagcaacgtttccttccaggtctgcattatatatcatcaatctaaatccctgttcacaaaaaaaaaaaaaaaaaaaa

SEQ ID NO: 10970 - protein, 76 aa, Zea mays
  misc_feature: Ceres CLONE ID no. 1702129
  misc_feature: Ceres CDNA ID no. 36707489
  misc_feature (2)..(76): Pfam Name: UPF0197 PFAM Desc: Uncharacterised protein family
  misc_feature: Homolog of GI Number: 57087469 NR Desc:  similar to UPF0197 protein C11orf10 homolog
  misc_feature: Homolog of GI Number: 61846335 NR Desc:  similar to UPF0197 protein C11orf10 homolog
  misc_feature: Homolog of GI Number: 63737442 NR Desc:  similar to UPF0197 protein C11orf10 homolog
  misc_feature: Homolog of GI Number: 73983490 NR Desc:  similar to UPF0197 protein C11orf10 homolog isoform 2
  misc_feature: Homolog of GI Number: 50794602 NR Desc:  similar to chromosome 11 open reading frame 10
  misc_feature: Homolog of GI Number: 51771674 NR Desc: similar to UPF0197 protein C11orf10 homolog
  misc_feature: Homolog of GI Number: 54607185 NR Desc: similar to chromosome 11 open reading frame 10
  misc_feature: Homolog of GI Number: 62644369 NR Desc:  similar to UPF0197 protein C11orf10 homolog
MAAKAISSPVPVEWYPTLAVVMVSVGLMFTASFFIYEATSSRRSRSLSKEIATAVVASVFLGFGSLFVLLASGVYV

SEQ ID NO: 10971 - DNA, 679 bp, Zea mays
  misc_feature: Ceres CLONE ID no. 1702527
  misc_feature: Ceres CDNA ID no. 40041575
  CDS (63)..(518): REFERENCED BY SEQ ID NO: 10972
aaaaaaaaaaaaaaaaaaattcagacattatcaagaagttggcagcagcagcggcagtagccatgggcatcctggaccacctgtcgcatctgtgcagcatcacggagacgaaggaggcgctcaagctcaggaagaagcggccgctgcagactgtgaacatcaaggtgaagatggactgcgaagggtgcgagcgccgcgtgaagagcgcggtgaagtcgatgcgcggcgtgacgagcgtggcggtgaacgccaagcagagcaagtgcacggtgaccggcaacgtggagcccgccaaggtgctggagcgcgtcaaggccaccggcaagaacgccgagatgtggccctacgtgccctacgcgctcaccacctacccctacgtcggcggcgcctacgacaagaaggcgcccgcgggattcgtccgcagcgcgccgcaggccatggcggaccccggcgcgccggagctcaagtacatgaacatgttcaacgacgacaacgtagacgcgtgcacagtcatgtagtttcttctcttcttctctttccgtggatcgatcggatatccctgtcactgtcatcaccggccggccggccggccttattattattcctactgaaaccaacgtcaattatatccgttcatgcatcttctcctccaaaaaaaacctaaaaaaaaaaaaaaaaa

SEQ ID NO: 10972 - protein, 151 aa, Zea mays
  misc_feature: Ceres CLONE ID no. 1702527
  misc_feature: Ceres CDNA ID no. 40041575
  misc_feature (32)..(92): Pfam Name: HMA PFAM Desc: Heavy
  misc_feature: Homolog of GI Number: 28866019 NR Desc: farnesylated protein 3
  misc_feature: Homolog of GI Number: 34914538 NR Desc: OSJNBa0094H06.16
  misc_feature: Homolog of GI Number: 28866017 NR Desc: farnesylated protein 2
  misc_feature: Homolog of GI Number: 21593460 NR Desc: putative isoprenylated protein
  misc_feature: Homolog of GI Number: 9755769 NR Desc: farnesylated protein ATFP6
  misc_feature: Homolog of GI Number: 32442810 NR Desc: putative farnesylated protein
  misc_feature: Homolog of GI Number: 50921835 NR Desc: OSJNBa0091C12.3
  misc_feature: Homolog of GI Number: 23304411 NR Desc: farnesylated protein 1
  misc_feature: Homolog of GI Number: 21536547 NR Desc: farnesylated protein
MGILDHLSHLCSITETKEALKLRKKRPLQTVNIKVKMDCEGCERRVKSAVKSMRGVTSVAVNAKQSKCTVTGNVEPAKVLERVKATGKNAEMWPYVPYALTTYPYVGGAYDKKAPAGFVRSAPQAMADPGAPELKYMNMFNDDNVDACTVM

SEQ ID NO: 10973 - DNA, 604 bp, Zea mays
  misc_feature: Ceres CLONE ID no. 1702709
  misc_feature: Ceres CDNA ID no. 36707344
  CDS (257)..(412): REFERENCED BY SEQ ID NO: 10974
tttatggcatatatgtacttgtccgaagataaacaaatacctgagaaagtgtttggtatcaccatatactgtttgttcttcatcatcttggagatgtgcagcagccatttgtaaactactttggatcaagttcctggtgtcatttctccctagattatcatttcacaaaacaacccctgtgcaggccgcaagcaagtcgaaggatgggaactttgaggaagtacttgatccaaggttacgtggctctgtatccagaatggtgctcagcgaggctcttgctgtggtggataggtgcactgggacagaacctgttggccggcctcggattagagaaatcattagagcccttcgccatgtggtgtccatatctcaggatgatactccgggtgcgtcatcgtcagccgcgagctagatacgtgcatggggtctgtcactccatcttcgatgaagcatataagaggcaaatgccgacaagaaagcaaaaactgtcgactgatgcgcatctgctgtttactgattaaaatataattcatgcatgtgactgttagactgtgtgctatatgtaagagactctgccttccatctcaaaaaaaaaaaaaaaaaa

SEQ ID NO: 10974 - protein, 51 aa, Zea mays
  misc_feature: Ceres CLONE ID no. 1702709
  misc_feature: Ceres CDNA ID no. 36707344
MVLSEALAVVDRCTGTEPVGRPRIREIIRALRHVVSISQDDTPGASSSAAS

SEQ ID NO: 10975 - DNA, 610 bp, Zea mays
  misc_feature: Ceres CLONE ID no. 1702759
  misc_feature: Ceres CDNA ID no. 36706906
  CDS (72)..(440): REFERENCED BY SEQ ID NO: 10976
aaccaaaggtatcttgcaatcacaacgaacaaaagctctcgatctcaccgacaccgaggaagaagagatcaatggcgtccgagcagggagtcgtgatcgcgtgccacagcaaggctgagtttgacgcccacatgaccaaggcccaggaagccggcaagctggtggtcatcgacttcactgccgcctggtgcggtccatgccgcgccatcgccccactgttcgtcgaacacgccaagaagttcactcaggtcgtcttcctgaaggtggacgtggacgaagtgaaggaagtcaccgcggcctacgaggtcgaggcgatgccgaccttccacttcgtcaagaacggcaagacggtcgcgaccatcgtgggtgccaggaaggacgagctcctggccctgatcgagaagcatgccgcgcctgcgcctgcgactgcgtctgcctaaatgagatcagatcagtcgtcgccgtcaataagggccagcacgtatggctgtaaatgttgtcgttatcagttctggctttgtcgtttgtgggcgatttgtgaactagtagtatgtttgtttctatccgagccggaggcgatacttaaccatggacaaaaaaaaaaaaaaaa

SEQ ID NO: 10976 - protein, 122 aa, Zea mays; identical to SEQ ID NO: 16
  misc_feature: Ceres CLONE ID no. 1702759
  misc_feature: Ceres CDNA ID no. 36706906
  misc_feature (8)..(114): Pfam Name: Thioredoxin PFAM Desc: Thioredoxin
  misc_feature: Homolog of GI Number: 66841004 NR Desc: thioredoxin h2 protein
  misc_feature: Homolog of GI Number: 82407383 NR Desc: Chain A
  misc_feature: Homolog of GI Number: 50934769 NR Desc: Thioredoxin H
  misc_feature: Homolog of GI Number: 27461140 NR Desc: thioredoxin H
  misc_feature: Homolog of GI Number: 32186040 NR Desc: thioredoxin h isoform 1
  misc_feature: Homolog of GI Number: 20047 NR Desc: thioredoxin
  misc_feature: Homolog of GI Number: 53748515 NR Desc: thioredoxin 1
  misc_feature: Homolog of GI Number: 40287476 NR Desc: thioredoxin
  misc_feature: Homolog of GI Number: 55670844 NR Desc: Chain A
  misc_feature: Homolog of GI Number: 33621084 NR Desc: thioredoxin H3

SEQ ID NO: 10977 - DNA, 599 bp, Zea mays
  misc_feature: Ceres CLONE ID no. 1703035
  misc_feature: Ceres CDNA ID no. 36706699
  CDS (69)..(368): REFERENCED BY SEQ ID NO: 10978
aaccccaccgcagcacagcgccggcaaccgccgccatcgatcgatcgcccggaaactgacctctaccgatgtctggagccggcgaggaggataagaagcccgcggagggcggcgcccacatcaaccttaaggtcaagggacaggatggcaacgaggtgttctttcgcataaagaggtccacccagctgaagaagctgatgaacgcctattgcgaccgccagtctgtggacatgaatgccattgcattcctgtttgatggccgcaggcttcgcggcgagcagacccctgatgagctggagatggaggacggcgacgagatcgacgccatgcttcaccagaccggaggcagcgttcctagcaccacctaaaagcagcagctgcggagcctcgttttgctctccgccctgcgtagtactaaacaaaagggaaaaagtctttttaaggaacttgtgatgctctggctccttgtgccattgctgagggacatccttagcctttatttagtggtatggtttggtactttgttctgtcatcactcgtttatctatccctaatacatgccgccatgtttgtacttcctgaaaaaaaaaaaaaaaaaa

SEQ ID NO: 10978 - protein, 99 aa, Zea mays; identical to SEQ ID NO: 36
  misc_feature: Ceres CLONE ID no. 1703035
  misc_feature: Ceres CDNA ID no. 36706699
  misc_feature (16)..(91): Pfam Name: ubiquitin PFAM Desc: Ubiquitin family
  misc_feature: Homolog of GI Number: 1668773 NR Desc: ubiquitin
  misc_feature: Homolog of GI Number: 34907010 NR Desc: putative ubiquitin
  misc_feature: Homolog of GI Number: 30725548 NR Desc: At4g26840
  misc_feature: Homolog of GI Number: 1707372 NR Desc: ubiquitin
  misc_feature: Homolog of GI Number: 20386084 NR Desc: ubiquitin
  misc_feature: Homolog of GI Number: 34907008 NR Desc: putative ubiquitin
  misc_feature: Homolog of GI Number: 21537401 NR Desc: ubiquitin
  misc_feature: Homolog of GI Number: 6433950 NR Desc: SUMO protein
  misc_feature: Homolog of GI Number: 2558518 NR Desc: Ubiquitin
  misc_feature: Homolog of GI Number: 55859483 NR Desc: ubiquitin

SEQ ID NO: 10979 - DNA, 761 bp, Zea mays
  misc_feature: Ceres CLONE ID no. 1703587
  misc_feature: Ceres CDNA ID no. 40352090
  CDS (69)..(563): REFERENCED BY SEQ ID NO: 10980
atcacaattcacagcgctcaagttctcgcgcccagagccaaatttttctccactcaatcactgcagccatggacgccagcggagccggtagcaaggcgaagaagggggcggctgggcgcaaggctggcggccccaggaagaagtcggtgtcgcggtccgtcaaggccgggctgcagttccccgtcggccggatcgggcgctacctcaagaagggccggtacgcgcagcgcgtgggcaccggcgcccccgtctatctcgccgccgtgcttgagtacctcgccgccgaggtgctggagctggccggcaacgcggcgaaggacaacaagaagacgcgcatcgtcccgcgccacgtgctcctggcgatccgcaacgacgttgagctcggcaagctgctggctggcgtcaccatcgcgcacggcggtgtcctccccaacatcaacccggttctcctgcccaagaaggtggcggagaaggcgtctagcggcggcagcaaggagagcaagtcccctaagaaggccgccaagtccccaaagaaggcagccaggtccccgaagaaggcttagaaattagtcactccactagcgctctgctgtagcatgttcgtgtttagatctgtggatgttatgtgttccggcctaatttcctctttgccttgtggcttctgatatgttcatcggcatgtttgccgtgttgtgtttccttgttctgattttgcaattcatcatcttgttgaatgaactcaaaaaaaaaaaaaaaaaaaa

SEQ ID NO: 10980 - protein, 164 aa, Zea mays
  misc_feature: Ceres CLONE ID no. 1703587
  misc_feature: Ceres CDNA ID no. 40352090
  misc_feature (29)..(104): Pfam Name: Histone PFAM Desc: Core histone H2A/H2B/H3/H4
MDASGAGSKAKKGAAGRKAGGPRKKSVSRSVKAGLQFPVGRIGRYLKKGRYAQRVGTGAPVYLAAVLEYLAAEVLELAGNAAKDNKKTRIVPRHVLLAIRNDVELGKLLAGVTIAHGGVLPNINPVLLPKKVAEKASSGGSKESKSPKKAAKSPKKAARSPKKA

SEQ ID NO: 10981 - DNA, 615 bp, Zea mays
  misc_feature: Ceres CLONE ID no. 1703592
  misc_feature: Ceres CDNA ID no. 35383548
  CDS (130)..(408): REFERENCED BY SEQ ID NO: 10982
gctggtcgaaggcccgaccgcaacaaatcacaccgaatcaccctctcgcccaccaggccaccaccacaccacaccacaccacaccacaccaccggcggcggcggcgacccagtcgagaacacgaaggcgatggcgacagcgctgaaccgcgggctccgcctcctcgccgccggcgccgaggcgtccaagccagcttctcgtggattccatgccaccggcgtgaagaggatgggagggcatggccatgatgagccatactacatccatgccaagcacatgtataacttgcacaggatgaagcatcagggtttgaaggtgacactctccgtgctgggagcggttggcatcggtgttggagtccctgtgtatgcagtcatattccagcagaagaagactgcctctggctgagatgatgcctctcgctgcctgcatatggagacttattttgagcgacatttttttgaagttaaaagcttggacttcatcctatcttggttgttgcctgatactgcattttcttaccataagttgtaacctcgtttcttgcggtttggtgtaggacacgacttttctgttaataatgttgtggcttgaacacaaaaaaaaaaaaaaaaa

SEQ ID NO: 10982 - protein, 92 aa, Zea mays
  misc_feature: Ceres CLONE ID no. 1703592
  misc_feature: Ceres CDNA ID no. 35383548
  misc_feature: Homolog of GI Number: 68611229 NR Desc: OSJNBa0084A10.18
MATALNRGLRLLAAGAEASKPASRGFHATGVKRMGGHGHDEPYYIHAKHMYNLHRMKHQGLKVTLSVLGAVGIGVGVPVYAVIFQQKKTASG

SEQ ID NO: 10983 - DNA, 810 bp, Zea mays
  misc_feature: Ceres CLONE ID no. 1703665
  misc_feature: Ceres CDNA ID no. 36707490
  CDS (150)..(509): REFERENCED BY SEQ ID NO: 10984
aaaggcaccagctcacacagctagctagctagcacctagcagtcgtacacacgggctagcagtcgatcacaaaccaatcgcggagaggcagtcacgtacgtatacgcacgggcacgtagctagttagcagtcgtagtcgtagcgtgacgatgagggttctctctgttgcggtcgctctggtcgtggtggtggccgcggcctgcctcgccgcgccgcggggcgcggacggcgcgggcgagtgcggggcgacgccgccggacacggtggcgctgaggctggcgccgtgcgcgtcggcggcggaggaccccggctccgcgccgtccggctcctgctgcagcgcggtgcacgccatcgggaagcagagccccaggtgcctctgcgccgtcatgctgtccaacaccgccaggagcgccgggatcaaggccgaggtcgccatcaccatccccaaacgctgcaacctcgccgaccgccccgttggctacaagtgcggagattacaccctgccatgagcggcggtgagttctccaggccggatttgctgcatggcatgcccgagtatcagtgtatcaccgaagcgcgagcgcctcttgtgtcgagcgagtccgtgtctgtcagtcagtctctatgtgttgcccataataaacaagacaagcgagtaccagacatgtgcaactctagtagtatggtgcgtgttatcactaggtacgcgtactcgtatatttgtgttcagttcaaggtctatagagatgtagccctgcattgtcgaaataaatactgtgtccactcgttcgtaaaaaaaaaaaaaaaaaa

SEQ ID NO: 10984 - protein, 119 aa, Zea mays; identical to SEQ ID NO: 6972
  misc_feature: Ceres CLONE ID no. 1703665
  misc_feature: Ceres CDNA ID no. 36707490
  misc_feature (31)..(113): Pfam Name: Tryp_alpha_amyl PFAM Desc: Protease inhibitor/seed storage/LTP family
  misc_feature: Homolog of GI Number: 50924127 NR Desc: OJ991214_12.11
  misc_feature: Homolog of GI Number: 50924129 NR Desc: OJ991214_12.12
  misc_feature: Homolog of GI Number: 50934537 NR Desc: protease inhibitor
  misc_feature: Homolog of GI Number: 50924828 NR Desc: OSJNBa0072F16.17

SEQ ID NO: 10985 - DNA, 587 bp, Zea mays
  misc_feature: Ceres CLONE ID no. 1703699
  misc_feature: Ceres CDNA ID no. 36707350
  CDS (97)..(237): REFERENCED BY SEQ ID NO: 10986
aacacggcttttggcagctacaaaccacccaaaagccacccccagaaaccggcggtccttgggtgttccggatctgagccagcagctgagaagaggatgagcgccgtggccgccatggcgactccgtcgacctcctcgacaccgacgacctcttctacgcgcctgacgtccaccacccccacaacgccaagccggcgctgctgcccgggtacgacctcgacatgctcagggcgctgagcctcagctccccccgggccgccgccgcgccgtcgccgtcgccgttgctgcgcgcccagcagcagaggcacgcggacaggccggcgcaccacgccaggggcgccgcgcgccgcgtcatcatccaccagcctcgctagaagcagcctgctcatggcgggccgccgccatggctgttgtgcctagtgtaacctcaagcaagtctagtctgtttctgtctgtgtatacgactaaaaaaacaacagatggaagattcggacgaggcggccagtgctctctcctcgtagccagcttctcctgttccagctcagttcttgttcatccagcagagcacccaaaaaaaaaaaaaaaaa

SEQ ID NO: 10986 - protein, 50 aa, Zea mays
  misc_feature: Ceres CLONE ID no. 1703699
  misc_feature: Ceres CDNA ID no. 36707350
MLRALSLSSPRAAAAPSPSPLLRAQQQRHADRPAHHARGAARRVIIHQPR

SEQ ID NO: 10987 - DNA, 796 bp, Zea mays
  misc_feature: Ceres CLONE ID no. 1703712
  misc_feature: Ceres CDNA ID no. 36707619
  CDS (136)..(582): REFERENCED BY SEQ ID NO: 10988
agcccaaatcccccgactcctcgcttcctcccgttccgtcgccgccgcgcgcctcggagaagagatagaggcggccgctgcatcgaccccgcgccacccccgcctgcctcccccggcaccgatcgggtttgatcgatggcgtcgaagaggatcctgaaggagttgaaggacctgcagaaggacccgcccacctcctgcagcgcaggtcctgttggtgaggacatgttccattggcaagcgaccatcatggggccttcggacagcccatttgcaggtggggtattcttggtgaacattcacttcccaccggattaccctttcaagccaccaaaggtgtctttccgcaccaaggttttccacccgaacatcaacagcaacggcagcatttgccttgacattcttaaggaacagtggagtcctgctttaactatctcaaaggttctcctgtcaatctgctcactgctcacggacccaaaccctgatgatcctcttgtccctgagattgctcacatgtacaagaccgacagggccaagtatgagtccaccgcacgctcctggacacagaagtatgccatgggctagaagcaaggctaaaagctggccaaactggtgaatgtgccggaccccaaatcgttatcacctaaataaccagtcaagtcgcaagtatgaatggacttttgaggaccattgtgccctgttgaactcatgtattaccttgtgaagtccgttgtgtctggtttctacctgaccgtttcgttatctgatgctgtttctttaacaaaaaaaaaaaaaaaaa

SEQ ID NO: 10988 - protein, 148 aa, Zea mays
  misc_feature: Ceres CLONE ID no. 1703712
  misc_feature: Ceres CDNA ID no. 36707619
  misc_feature: The plant produces a reduced number of seeds.
  misc_feature: Useful for biocontainment applications
  misc_feature (5)..(142): Pfam Name: UQ_con PFAM Desc: Ubiquitin
  misc_feature: Homolog of GI Number: 50929483 NR Desc: OSJNBa0043A12.6
  misc_feature: Homolog of GI Number: 52548244 NR Desc: ubiquitin
  misc_feature: Homolog of GI Number: 2668744 NR Desc: ubiquitin conjugating enzyme
  misc_feature: Homolog of GI Number: 5762457 NR Desc: ubiquitin
  misc_feature: Homolog of GI Number: 66354464 NR Desc: ubiquitinating enzyme
  misc_feature: Homolog of GI Number: 464981 NR Desc: Ubiquitin
  misc_feature: Homolog of GI Number: 34909292 NR Desc: ubiquitin conjugating enzyme
  misc_feature: Homolog of GI Number: 28569271 NR Desc: ubiquitin
  misc_feature: Homolog of GI Number: 28569267 NR Desc: ubiquitin
  misc_feature: Homolog of GI Number: 50906823 NR Desc: ubiquitin
MASKRILKELKDLQKDPPTSCSAGPVGEDMFHWQATIMGPSDSPFAGGVFLVNIHFPPDYPFKPPKVSFRTKVFHPNINSNGSICLDILKEQWSPALTISKVLLSICSLLTDPNPDDPLVPEIAHMYKTDRAKYESTARSWTQKYAMG

SEQ ID NO: 10989 - DNA, 857 bp, Zea mays
  misc_feature: Ceres CLONE ID no. 1703839
  misc_feature: Ceres CDNA ID no. 36707620
  CDS (114)..(590): REFERENCED BY SEQ ID NO: 10990
accggccgtctcgatcccagcatccgagagagctccacaggccaggtccccatcgccgcggcgcttgccccacctctcccccgcccggtagtagcctcgccgccgttgccgagatggggttcgtgtccttcgtcgggagggtgctcttcgtcgccgctttcctcctctccgcctaccaggagtttaatgaattcggtgctgatggtggaccagcagctaaggcccttcggcccaaattcaacgtgtttgtcaaaaatgtatctgctcatctgggagtagctgtgccacacattgagttgaagcatgtgattgctgctacaattggtcttaagggtcttggaagcctcctttttattttgagcagctctctcggtgcttatctcctgctgctgtaccttgctttgatcactcctatcatccatgacttctacaactacgatatggagaaggcagaatttgcaggcctctttgcgaagttcacccaggatttggcgctgatcggagctctgctcttctttctgggcatgaagaactccatcccgaagcggcagggcggcaagaagaaggcccccaaggcgaagacgaactagggctgcttagatagctgcacgcctcaggcggggtgtatcaggccacaggtctatttcgaagcaggcccagcgcgatgcagcgaatgccatcgagctgcgcttttacatgtttatcatcagattccattttgcggggcacggcccggacaaaggtgtgaccggggtgggttaggcgactagattgcacgattatgtacttgcgatttgtttgttgaactgggttgccgacagttaatcttcatttgatttcaaaaaaaaaaaaaaaaa

SEQ ID NO: 10990 - protein, 158 aa, Zea mays; identical to SEQ ID NO: 9454
  misc_feature: Ceres CLONE ID no. 1703839
  misc_feature: Ceres CDNA ID no. 36707620
  misc_feature (1)..(138): Pfam Name: HR_lesion PFAM Desc: HR
  misc_feature: Homolog of GI Number: 78708743 NR Desc: HR
  misc_feature: Homolog of GI Number: 31432358 NR Desc: putative RNA
  misc_feature: Homolog of GI Number: 50930299 NR Desc: OSJNBa0027O01.6
  misc_feature: Homolog of GI Number: 21553825 NR Desc: elicitor like protein
  misc_feature: Homolog of GI Number: 20147297 NR Desc: At1g04340/F19P19_23
  misc_feature: Homolog of GI Number: 21592798 NR Desc: Nicotiana lesion
  misc_feature: Homolog of GI Number: 33589726 NR Desc: At5g43460/MWF20_18
  misc_feature: Homolog of GI Number: 40287494 NR Desc: putative lesion
  misc_feature: Homolog of GI Number: 7939528 NR Desc: HR

SEQ ID NO: 10991 - DNA, 605 bp, Zea mays
  misc_feature: Ceres CLONE ID no. 1703844
  misc_feature: Ceres CDNA ID no. 36707288
  CDS (80)..(490): REFERENCED BY SEQ ID NO: 10992
aatccacagctcgcatccgatttccaatttcaaatccttcgatcgcgcagcgccgcccgccctctcgcagctctctccgatggcccgcacgaagcagacggcgaggaagtcaactggcggcaaggcgccgcggaagcagctggccaccaaggcggcgcgcaagtcggctccggccaccggcggcgtgaagaagccgcacaggttccgccccggcaccgtcgctctccgcgagatccgcaagtaccagaagagcacggagctgctcatccggaagctgcccttccagcggctggtgcgtgagatcgcgcaagacttcaagaccgaccttcggttccagtcctccgctgtcgccgcgctgcaggaggccgccgaggcgtatctggtgggtctctttgaggacaccaacctctgcgccatccacgccaagagggtcaccatcatgcccaaggacatccagctcgcgcgccgcatcaggggcgagagggcctgattgctgctctgtcttcctgtttctgtaatgtctgaactaggcgatggactctatcgcttcttgtcctgcaatcgtgtaccgatgttcttggcaaaaaaaaaaaaaaaaaaaaaaa

SEQ ID NO: 10992 - protein, 136 aa, Zea mays; identical to SEQ ID NO: 358
  misc_feature: Ceres CLONE ID no. 1703844
  misc_feature: Ceres CDNA ID no. 36707288
  misc_feature (58)..(134): Pfam Name: Histone PFAM Desc: Core histone H2A/H2B/H3/H4
  misc_feature: Homolog of GI Number: 59799581 NR Desc: Histone H3
  misc_feature: Homolog of GI Number: 1362108 NR Desc: histone H3 homolog
  misc_feature: Homolog of GI Number: 74004258 NR Desc:  similar to histone 1
  misc_feature: Homolog of GI Number: 55775689 NR Desc: histone 3
  misc_feature: Homolog of GI Number: 72093532 NR Desc:  similar to H3 histone
  misc_feature: Homolog of GI Number: 166384 NR Desc: histone H3
  misc_feature: Homolog of GI Number: 122083 NR Desc: Histone H3
  misc_feature: Homolog of GI Number: 34858260 NR Desc: similar to histone protein Hist2h3c1
  misc_feature: Homolog of GI Number: 74004208 NR Desc:  similar to histone 1
  misc_feature: Homolog of GI Number: 50729226 NR Desc:  similar to histone protein Hist2h3c1

SEQ ID NO: 10993 - DNA, 457 bp, Zea mays
  misc_feature: Ceres CLONE ID no. 1703892
  misc_feature: Ceres CDNA ID no. 36707680
  CDS (2)..(157): REFERENCED BY SEQ ID NO: 10994
acaaaagaggaaaggcttgcggtggatacctaggcacccagagaacgtggagagtgctcctcctcctatgaagaaggactacaaactggctaatcttctatgctgggaggaggaagcggatgccatggaggagaaggcgggagtgcttgatgagtaagacgggcttctggggtcgatttgcttctgagttgtttattttatatcgtcgcaatttcgtggttgtcgtttggttattctgtgaagcagccaagccaagctattgttatgaaaatttgtcgtctgtaagcatgtgaacttccgacgttgccacatgctggatcagtctgaataagtaagtatgcagctctaggtggtcagctgcgtctaccacaatgagcatgtacgtatggagaaatatctgtgaacccattttgtttatgaataagatttgttttttcgagttaaaaaaaaaaaaaaa

SEQ ID NO: 10994 - protein, 29 aa, Zea mays
  misc_feature: Ceres CLONE ID no. 1703892
  misc_feature: Ceres CDNA ID no. 36707680
  misc_feature: Homolog of GI Number: 1532073 NR Desc: S
MKKDYKLANLLCWEEEADAMEEKAGVLDE

SEQ ID NO: 10995 - DNA, 601 bp, Zea mays
  misc_feature: Ceres CLONE ID no. 1703923
  misc_feature: Ceres CDNA ID no. 36707621
  CDS (1)..(600): REFERENCED BY SEQ ID NO: 10996
aatccccactcctgcagtccttctccacctagctcccccgcgccaagaacacgccagctagcaagcgcgctcgatcgaataccgttaccgtgtcgccatggccgccaccgcgtctctatcagccgtcggggcgccgctgtcggtgcccgggctcaggaagccgctcggcgtgtcgtcgctccggcccctgcagccgagggcggcgaggatgacgacgacggccgtgcgggcgtcggcgtcgccctcgtccacgtccatcaaggagaaggctgcggccgggctgaccgcggcggccctggcggccgcgctggtgctgccggacgtcgcggaggccgcgcagtccggcgggctcacgccgtcgctcaagaacttcctcctcagcatcgtgtccggtggggtcgtgctcgttggtattgtcggcgccgtcgtcgccgtctccaacttcgaccccgtcaagagggcctgatcggaatccatcgtatcgatcgtctcgcctgtgtcctgtcctgtgcctgtgctgtctgtatcgactggtggtgctatatcccctgtgtgttaattgattttggagaatgttcagacgtaaaaaaaaaaaaaaaaa

SEQ ID NO: 10996 - protein, 122 aa, Zea mays
  misc_feature: Ceres CLONE ID no. 1703923
  misc_feature: Ceres CDNA ID no. 36707621
  misc_feature (85)..(122): Pfam Name: PsbX PFAM Desc: Photosystem II reaction centre X protein
  misc_feature: Homolog of GI Number: 50939905 NR Desc: putative ultraviolet
  misc_feature: Homolog of GI Number: 45356861 NR Desc: ultraviolet
  misc_feature: Homolog of GI Number: 33520421 NR Desc: ultraviolet
  misc_feature: Homolog of GI Number: 18476498 NR Desc: ultraviolet
  misc_feature: Homolog of GI Number: 55243477 NR Desc: ENSANGP00000028942
MAATASLSAVGAPLSVPGLRKPLGVSSLRPLQPRAARMTTTAVRASASPSSTSIKEKAAAGLTAAALAAALVLPDVAEAAQSGGLTPSLKNFLLSIVSGGVVLVGIVGAVVAVSNFDPVKRA

SEQ ID NO: 10997 - DNA, 677 bp, Zea mays
  misc_feature: Ceres CLONE ID no. 1703926
  misc_feature: Ceres CDNA ID no. 36706875
  CDS (95)..(505): REFERENCED BY SEQ ID NO: 10998
aaaaaaaaacgcggcacagagcctcattcatctccattcgaaacaccctcgcacccacactctcccttcgtccccagcctaaatccccgcaacgatggctcgcacgaagcagacggcgcgcaagtccacgggcggcaaggccccgaggaagcagctggcgaccaaggcggcgcgcaagtcggcccctgcgaccggcggcgtgaagaagccgcaccgcttccgcccgggcaccgtggcgctgcgcgagatccgcaagtaccagaagagcacggagctgctcatccgcaagctgcccttccagcgcctggtccgcgagatcgcgcaggacttcaagaccgacctccgcttccagtcctccgccgtcgccgcgctgcaggaggccgccgaggcttacctcgtcggcctgttcgaggacaccaacctctgcgccatccacgccaagcgcgtcaccatcatgcccaaggacatccagctcgcccgccgcatccgcggggagcgcgcctaggcggccggccggccggataggccgtggcgcagtctcttctcggaagtttgtactagtggtcgggtcgtgtggagggagtggtgtactaatcagcaatgtctcaaaccatgtcaacctctttgttgtcatcaatggaaatcgctacttatgtgtgcaaaaaaaaaaaaaaaaa

SEQ ID NO: 10998 - protein, 136 aa, Zea mays; identical to SEQ ID NO: 358
  misc_feature: Ceres CLONE ID no. 1703926
  misc_feature: Ceres CDNA ID no. 36706875
  misc_feature (58)..(134): Pfam Name: Histone PFAM Desc: Core histone H2A/H2B/H3/H4
  misc_feature: Homolog of GI Number: 59799581 NR Desc: Histone H3
  misc_feature: Homolog of GI Number: 1362108 NR Desc: histone H3 homolog
  misc_feature: Homolog of GI Number: 55775689 NR Desc: histone 3
  misc_feature: Homolog of GI Number: 50728592 NR Desc:  similar to histone protein Hist2h3c1
  misc_feature: Homolog of GI Number: 166384 NR Desc: histone H3
  misc_feature: Homolog of GI Number: 122083 NR Desc: Histone H3
  misc_feature: Homolog of GI Number: 68362812 NR Desc:  similar to CG31613
  misc_feature: Homolog of GI Number: 74004201 NR Desc:  similar to histone 1
  misc_feature: Homolog of GI Number: 73808028 NR Desc: histone H3
  misc_feature: Homolog of GI Number: 50729226 NR Desc:  similar to histone protein Hist2h3c1

SEQ ID NO: 10999 - DNA, 675 bp, Zea mays
  misc_feature: Ceres CLONE ID no. 1704039
  misc_feature: Ceres CDNA ID no. 36707516
  CDS (69)..(548): REFERENCED BY SEQ ID NO: 11000
atcttgctctgaacgcattcctcccatctcccaagacctcctcagacccgagaagcgcagctgcggccatggacgccaccggcactggagctggagggaaggcgaagaagggagcggccggtcgcaaggccggcgggccgaggaagaagtcggtgacgaggtccgtgaaggccgggctccagttccccgtcggccgcatcgggcgctacctcaagaagggccgctacgcgcagcgcgtcggcagcggtgcccccgtctacctcgcggccgtcctggagtacctcgccgctgaggtcctggagctcgccggcaacgctgccaaggacaacaagaagacgcgcatcgtcccgcgccacgtgctgctggcgatccgcaacgacgaggagctcgggaagctgctgaccggcgtgaccatcgcccacggcggcgtgttgcccaacatcaacccggtcctgctgcccaagaagacggcggagaaggcgtccagcggcgggagcaaggaggccaagtcgcccaagaaggccgccaagtcccccaagaaggcatagggtttggaggcggatccgatgttgtcatgtgtaggttgtaagcgggcaatgtgattggctgtgtatctgcttcgctcaagttgctttatgtcattcctaatggaatagtaaaaaaaaaaaaaaaaaa

SEQ ID NO: 11000 - protein, 159 aa, Zea mays; identical to SEQ ID NO: 10436
  misc_feature: Ceres CLONE ID no. 1704039
  misc_feature: Ceres CDNA ID no. 36707516
  misc_feature (37)..(101): Pfam Name: CBFD_NFYB_HMF PFAM Desc: Histone
  misc_feature: Homolog of GI Number: 729671 NR Desc: Histone H2A
  misc_feature: Homolog of GI Number: 34914498 NR Desc: putative histone H2A
  misc_feature: Homolog of GI Number: 47026912 NR Desc: histone H2A
  misc_feature: Homolog of GI Number: 121982 NR Desc: Histone H2A.2.2
  misc_feature: Homolog of GI Number: 7649159 NR Desc: histone H2A
  misc_feature: Homolog of GI Number: 47026919 NR Desc: histone H2A
  misc_feature: Homolog of GI Number: 121974 NR Desc: Histone H2A.2.1
  misc_feature: Homolog of GI Number: 122006 NR Desc: Histone H2A
  misc_feature: Homolog of GI Number: 68441405 NR Desc:  similar to histone H2A
  misc_feature: Homolog of GI Number: 61826353 NR Desc:  similar to Histone H2A.x

SEQ ID NO: 11001 - DNA, 658 bp, Zea mays
  misc_feature: Ceres CLONE ID no. 1704077
  misc_feature: Ceres CDNA ID no. 36707351
  CDS (142)..(465): REFERENCED BY SEQ ID NO: 11002
aactgagatttgcctcacatcatctccgattccttcccctacttccgtccccatcagtggacccagccgagatcgactggatctcctggctcgggcggctttgatggttcctggggtcggcccggggaggagttcgaggcgatgagcaggcttgcgtcggggctccagcgcccgcggaggtcgttgtcgccgtgcgaggtgctgtggtgcgcgctcgcgtcatgcggcctagtgcttttctcgcagctcgccgtggcgatggttccccgcctcttcccttccctctatctcctcgccatgctccccatcgcggggctggtgttactcgcggctatcgtgctcggccgcctgtggaggaggttcatcggagtgacggcgtcggcgccgctcttcgtgctcttcaacatcctcctatcgtggggcgtttacatcttcgtaatccgtagaagtgagctcttgtggtaatgcttgcggacttgcactgtattggtaggacacaatcgatcgctgtggtgtggatatttgctatttttgtcttgctgcctctggaagttagtaaaattacctggaaggttatacctctatgtcttagcttgagaaatttgtaattttgccactatcagttttggcttcctgttacaaaaaaaaaaaaaaaaaa

SEQ ID NO: 11002 - protein, 107 aa, Zea mays
  misc_feature: Ceres CLONE ID no. 1704077
  misc_feature: Ceres CDNA ID no. 36707351
MSRLASGLQRPRRSLSPCEVLWCALASCGLVLFSQLAVAMVPRLFPSLYLLAMLPIAGLVLLAAIVLGRLWRRFIGVTASAPLFVLFNILLSWGVYIFVIRRSELLW

SEQ ID NO: 11003 - DNA, 478 bp, Zea mays
  misc_feature: Ceres CLONE ID no. 1704452
  misc_feature: Ceres CDNA ID no. 29191881
  CDS (112)..(357): REFERENCED BY SEQ ID NO: 11004
ctcgcccctctccctctctcccaccccgcagccgccgcgcaggtagccctagcacccgcgacgagcaggatctgcccagctgctcttgcggtagttcccccaactgtcaccatgcagaacgaggagggtaagactgtggacctctatgtccccaggaagtgctcggccacaaacaggatcatcactgccaaggaccatgcctctgtccagatcaacattggccacttggatgcgaatggcctgtatgatggtcacttcacaacgtttgctctctctgggtttgtccgtgctcagggcgacgcagacagctccttggacaggttgtggcagaagaagaaggctgatatcaagcagtagattttacatcaagtttaccaagaattggacactgccttagctatgttttgaattcatgtcactatatgcaatgttgtgatttcagctggtaccttgaatacaaaaaaaaaaaaaaaaaaaa

SEQ ID NO: 11004 - protein, 81 aa, Zea mays; identical to SEQ ID NO: 6286
  misc_feature: Ceres CLONE ID no. 1704452
  misc_feature: Ceres CDNA ID no. 29191881
  misc_feature (1)..(81): Pfam Name: Ribosomal_S21e PFAM Desc: Ribosomal protein S21e
  misc_feature: Homolog of GI Number: 1419372 NR Desc: ribosomal protein S21
  misc_feature: Homolog of GI Number: 1707868 NR Desc: 40S ribosomal subunit protein S21
  misc_feature: Homolog of GI Number: 303839 NR Desc: 40S subunit ribosomal protein
  misc_feature: Homolog of GI Number: 50917601 NR Desc: 40S subunit ribosomal protein
  misc_feature: Homolog of GI Number: 53370646 NR Desc: 40S ribosomal protein S21
  misc_feature: Homolog of GI Number: 15241026 NR Desc: 40S ribosomal protein S21
  misc_feature: Homolog of GI Number: 20148437 NR Desc: 40S ribosomal protein S21 homolog
  misc_feature: Homolog of GI Number: 21554974 NR Desc: 40S ribosomal protein S21 homolog
  misc_feature: Homolog of GI Number: 6012958 NR Desc: 40S ribosomal protein S21
  misc_feature: Homolog of GI Number: 55653172 NR Desc:  similar to ribosomal protein S21

SEQ ID NO: 11005 - DNA, 644 bp, Zea mays
  misc_feature: Ceres CLONE ID no. 1704636
  misc_feature: Ceres CDNA ID no. 40041576
  CDS (86)..(499): REFERENCED BY SEQ ID NO: 11006
cgagtgagcttagcggaatcttgctctgaacgcattcctcccatctcccaagacctcctcagacccgagaagcgcagctgcggccatggacgccaccggcactggagctggagggaaggcgaagaagggagcggccggtcgcaaggccggcgggccgaggaagaagtcggtgatgaggtccgtgaaggccgggctccagttccccgtctacctcgcggccgtcctggagtacctcgccgctgaggtcctggagctcgccggcaacgctgccaaggacaacaagaagacgcgcatcgtcccgcgccacgtgctgctggcgatccgcaacaacgaggagctcgggaagctgctgaccggcgtgaccatcgcccacggcggcgtgttgcccaacatcaacccggtcctgctgcccaagaagacggcggagaaggcgtccagcggcgggagcaaggaggccaagtcgcccaagaaggccgccaagtcccccaagaaggcatagggtttggaggcggatccgatgttgtcatgtgtaggttgtaagcgggcaatgtgattggctgtgtatctgcttcgctcaagttgctttatgtcattcctaatggaataggaaatgccgtgtttcctaaaaaaaaaaaaaaaaaaaa

SEQ ID NO: 11006 - protein, 137 aa, Zea mays
  misc_feature: Ceres CLONE ID no. 1704636
  misc_feature: Ceres CDNA ID no. 40041576
  misc_feature (19)..(84): Pfam Name: Histone PFAM Desc: Core histone H2A/H2B/H3/H4
  misc_feature: Homolog of GI Number: 121982 NR Desc: Histone H2A.2.2
  misc_feature: Homolog of GI Number: 121974 NR Desc: Histone H2A.2.1
  misc_feature: Homolog of GI Number: 122006 NR Desc: Histone H2A
  misc_feature: Homolog of GI Number: 729669 NR Desc: Histone H2A
  misc_feature: Homolog of GI Number: 729671 NR Desc: Histone H2A
  misc_feature: Homolog of GI Number: 536888 NR Desc: protein H2A
  misc_feature: Homolog of GI Number: 536894 NR Desc: protein H2A
  misc_feature: Homolog of GI Number: 21554077 NR Desc: histone H2A
  misc_feature: Homolog of GI Number: 6009909 NR Desc: histone H2A
  misc_feature: Homolog of GI Number: 1325968 NR Desc: histone H2A
MDATGTGAGGKAKKGAAGRKAGGPRKKSVMRSVKAGLQFPVYLAAVLEYLAAEVLELAGNAAKDNKKTRIVPRHVLLAIRNNEELGKLLTGVTIAHGGVLPNINPVLLPKKTAEKASSGGSKEAKSPKKAAKSPKKA

SEQ ID NO: 11007 - DNA, 659 bp, Zea mays
  misc_feature: Ceres CLONE ID no. 1705077
  misc_feature: Ceres CDNA ID no. 40352091
  CDS (58)..(306): REFERENCED BY SEQ ID NO: 11008
tgagcttcgttcgttcagttcatccgtgttcttgtttgcgaggtcgagagagagaggatgtcgtgctgcggaggcaactgtgggtgcggctccggctgcaagtgcggcaacggctgcggagggtgcagcaagatgtacccggacatggctgagcaggtgaccaccaccacccaggctctcatcatgggtgtcgcaccatccaaggggcacgccgagggcgggttcgaggcggccgccggagctgagaacggcgggtgcaagtgcggcggcaactgccagtgcgacccctgcaactgcggcaagtgaactaggtgctccaccctgcaggccggccggaggaagctagctaattattataagctaaataaagtatagcggcgtcgctgtgtgtgtttcgagtcagtcagtcagttagttgcgtgccatggctggcatgctctgagtctgagatgatgatgatgcctgatggcggcgtcgtgtcctgtagtcctcccctgccccctcgggcgcttctggcggcgagcagtgtgttgtgttgtgttgtgtgggtgcagcacggtagcaggctagccatgtgccctgctgtgttgtgtcaccatccatctataataatcttatatctataccccaccttttgtgcaaaaaaaaaaaaaaaaaaa

SEQ ID NO: 11008 - protein, 82 aa, Zea mays; identical to SEQ ID NO: 906
  misc_feature: Ceres CLONE ID no. 1705077
  misc_feature: Ceres CDNA ID no. 40352091
  misc_feature (1)..(80): Pfam Name: Metallothio_2 PFAM Desc: Metallothionein

SEQ ID NO: 11009 - DNA, 572 bp, Zea mays
  misc_feature: Ceres CLONE ID no. 1705269
  misc_feature: Ceres CDNA ID no. 35383549
  CDS (3)..(398): REFERENCED BY SEQ ID NO: 11010
acctcagcacaacactctccccagctcgagtaaccaccgcgagaaccaatcaccaagcaaaagcccgagaaggaaagaacaaacaggagacagatggcggctgcagcgaaggcgtcgtggatggtggcgatgagcgtcggggccgtggaggcgctcaaggaccaggcgggcctctgccgctggaactacgcgctgcgctccgtccaccgcgccgccaaggccaacgctcccagcttcgcgcaggccaggaaaaagctggcgccgcccgccgcggacaaggccgccgcggaggaggggatgaggaccgtcatgtacctcagctgctggggccccaactagctagggcctctgctagtttcggcttcctgcaaccgtaccgagctcggcttcaaatctgatccatgactggttgccttgccgacccactgtataacataggagtatagcaccaccacgacgatgatgatgaaaagttctgccacttgatttcagttcctcaaaactctgaatggattggcgtggaaataaaatgaagagcgcatttctgttcagaaaaaaaaaaaaaaaaaaaa

SEQ ID NO: 11010 - protein, 81 aa, Zea mays
  misc_feature: Ceres CLONE ID no. 1705269
  misc_feature: Ceres CDNA ID no. 35383549
  misc_feature: Homolog of GI Number: 50928991 NR Desc: OSJNBa0043L09.19
  misc_feature: Homolog of GI Number: 50928999 NR Desc: OSJNBa0043L09.23
  misc_feature: Homolog of GI Number: 50929001 NR Desc: OSJNBa0043L09.24
  misc_feature: Homolog of GI Number: 50929003 NR Desc: OSJNBa0043L09.25
  misc_feature: Homolog of GI Number: 19320 NR Desc: wound induced protein
  misc_feature: Homolog of GI Number: 21553934 NR Desc: probable wound
  misc_feature: Homolog of GI Number: 50928989 NR Desc: OSJNBa0043L09.18
  misc_feature: Homolog of GI Number: 6688818 NR Desc: putative wound
MAAAAKASWMVAMSVGAVEALKDQAGLCRWNYALRSVHRAAKANAPSFAQARKKLAPPAADKAAAEEGMRTVMYLSCWGPN

SEQ ID NO: 11011 - DNA, 543 bp, Zea mays
  misc_feature: Ceres CLONE ID no. 1705588
  misc_feature: Ceres CDNA ID no. 36707494
  CDS (6)..(233): REFERENCED BY SEQ ID NO: 11012
cgttaatgtggaacaacccattcacggagcggcatcttcacacaatcaaccaactgggcatagccttgatccccccagttaccaaaaggctggcctgtggcgattacgggaatggcgcaatggccgaaacctcacagatccatacttccgtgaggctcgcgtgcaagacgcaaccgcacgatgcgagcagttcactcgcaggtcctgtcagtaataaccggccatctagctgatgcagcggttggccacttgattgtcaagcttaggaatttgttttatctggagtgttgtaccagatttttttcaactagagtttgtgtgtattgaattagggggaaaggttgttgtcacatgataacaataacttccaatgatgactctattcagtttgtaattgtctgtgggagtacaattatgcagctgtattgtctgctacaatattgtttgtttgtgtgtgtgggagtggggggtgctgttgccacagagatagattcctccctgcccagtaatggtagtgattatctaaaaaaaaaaaaaaaaaaa

SEQ ID NO: 11012 - protein, 75 aa, Zea mays
  misc_feature: Ceres CLONE ID no. 1705588
  misc_feature: Ceres CDNA ID no. 36707494
  misc_feature: Homolog of GI Number: 51090974 NR Desc: putative HAL3B
  misc_feature: Homolog of GI Number: 52218792 NR Desc: At3g18030
  misc_feature: Homolog of GI Number: 28948674 NR Desc: Chain A
  misc_feature: Homolog of GI Number: 2047324 NR Desc: HAL3B protein
  misc_feature: Homolog of GI Number: 8778701 NR Desc: T1N15.24
  misc_feature: Homolog of GI Number: 12583571 NR Desc: putative halotolerance protein HAL3 homolog
MWNNPFTERHLHTINQLGIALIPPVTKRLACGDYGNGAMAETSQIHTSVRLACKTQPHDASSSLAGPVSNNRPSS

SEQ ID NO: 11013 - DNA, 487 bp, Zea mays
  misc_feature: Ceres CLONE ID no. 1705688
  misc_feature: Ceres CDNA ID no. 29191595
  CDS (62)..(322): REFERENCED BY SEQ ID NO: 11014
ggagagagagagagagagtgaccctgccgggcgggagagagccaggaagaggagggcgacgatggcgtccggctggggcatcaacgggaacaagggccgctgctacgacttctggctggagttcagcgagtgcatgagccgctgccgccagccctccgactgcggcctcctccgcgaggactatctcgagtgcctccaccactccaaggagttccagcgcaggaacaggatctacaaggaggagcaacgtcagatcagagctgctgctcgtaaggccaaggaggaagctgagggtgcccctgctgttgcagcacaccattagtctccctgtctattttttgtgttgttgttttctgttaactcatctttggttcagttatgatgctaagggcaaggcaataatctccagctgttggactacacagattttttcccccatgacttaaatatcaagactcattttgtgtaaaaaaaaaaaaaaaaaaaa

SEQ ID NO: 11014 - protein, 86 aa, Zea mays; identical to SEQ ID NO: 356
  misc_feature: Ceres CLONE ID no. 1705688
  misc_feature: Ceres CDNA ID no. 29191595
  misc_feature: Homolog of GI Number: 50948425 NR Desc: putative fiber protein Fb14
  misc_feature: Homolog of GI Number: 66271051 NR Desc: Fb14

SEQ ID NO: 11015 - DNA, 611 bp, Zea mays
  misc_feature: Ceres CLONE ID no. 1705772
  misc_feature: Ceres CDNA ID no. 36707136
  CDS (94)..(327): REFERENCED BY SEQ ID NO: 11016
acaatcagccatcgccaccacctccctccgcggctccgccttccgccgcgaacacgccgctgtctcgaccccttgtcctcctccttcagcaagatggcggagattgagataaaaacagcacctgctgacttccgcttccctacaacaaaccaaacaaggcattgttttactcgctatgtcgagtaccacaggtgtttgaatgccaaaggggatgatgctggtgtttgcgaaaaatttgccaagtactacaggtccctttgccctggagaatgggttgagaaatggaacgagcagagggagcatgggacgtttccaggacctctctgaatgtaccgcccgagacctccagttggaccagtcaacaagttggccaggcagtcctactgttccattctgcattcctacttccagaatcgtaaatgccttttgtcccttgctcttcaaccagtcaccacaaaactgttagtgatgcctctcgtatgcagctctaataatttggctacagttgccccacatgcagccttgttttgtgtgtggactgtgggcctcattttgtaaacgtctgaatggacttgcattttctttcgtgtcaaaaaaaaaaaaaaaaaaaa

SEQ ID NO: 11016 - protein, 77 aa, Zea mays
  misc_feature: Ceres CLONE ID no. 1705772
  misc_feature: Ceres CDNA ID no. 36707136
  misc_feature (5)..(76): Pfam Name: COX6B PFAM Desc: Cytochrome oxidase c subunit VIb
  misc_feature: Homolog of GI Number: 50926015 NR Desc: OSJNBa0067K08.22
  misc_feature: Homolog of GI Number: 37991922 NR Desc: cytochrome c oxidase subunit 6b
  misc_feature: Homolog of GI Number: 22204116 NR Desc: putative cytochrome c oxidase subunit
  misc_feature: Homolog of GI Number: 21554378 NR Desc: cytochrome c oxidase subunit
  misc_feature: Homolog of GI Number: 20465723 NR Desc: putative cytochrome c oxidase subunit
  misc_feature: Homolog of GI Number: 34906824 NR Desc: putative cytochrome c oxidase subunit 6b
  misc_feature: Homolog of GI Number: 21592329 NR Desc: cytochrome c oxidase subunit 6b
  misc_feature: Homolog of GI Number: 70663890 NR Desc: OSJNBa0029H02.2
  misc_feature: Homolog of GI Number: 62644353 NR Desc:  similar to Cytochrome c oxidase polypeptide VIb
  misc_feature: Homolog of GI Number: 57086685 NR Desc:  similar to chymodenin
MAEIEIKTAPADFRFPTTNQTRHCFTRYVEYHRCLNAKGDDAGVCEKFAKYYRSLCPGEWVEKWNEQREHGTFPGPL

SEQ ID NO: 11017 - DNA, 570 bp, Zea mays
  misc_feature: Ceres CLONE ID no. 1705944
  misc_feature: Ceres CDNA ID no. 35383550
  CDS (2)..(400): REFERENCED BY SEQ ID NO: 11018
gcacctcagcacaacactctccccagctcgagtaaccaccgcgagaaccaatcaccaagcaaaagcccgagaaggaaagaacaaacaggagacagatggcggctgcagcgaaggcgtcgtggatggtggcgatgagcgtcggggccgtggaggcgctcaaggaccaggcgggcctctgccgctggaactacgcgctgcgctccgtccaccgcgccgccaaggccaacgctcccagcttcgcgcaggccaggaaaaagctggcgccgcccgccgcggacaaggccgccgcggaggaggggatgaggaccgtcatgtacctcagctgctggggccccaactagctagggcctctgctagtttcggcttcctgcaaccgtaccgagctcggcttcaaatctgatccatgactggttgccttgccgacccactgcataacataggagtatagcaccaccacgacgatgatgatgaaaagttctgccacttgatttcagttcctcaaaactctgaatggattggcgtggaaataaaatgaagagcgcatttctgtaaaaaaaaaaaaaaaaaaaa

SEQ ID NO: 11018 - protein, 81 aa, Zea mays; identical to SEQ ID NO: 11010
  misc_feature: Ceres CLONE ID no. 1705944
  misc_feature: Ceres CDNA ID no. 35383550
  misc_feature: Homolog of GI Number: 50928991 NR Desc: OSJNBa0043L09.19
  misc_feature: Homolog of GI Number: 50928999 NR Desc: OSJNBa0043L09.23
  misc_feature: Homolog of GI Number: 50929001 NR Desc: OSJNBa0043L09.24
  misc_feature: Homolog of GI Number: 50929003 NR Desc: OSJNBa0043L09.25
  misc_feature: Homolog of GI Number: 19320 NR Desc: wound induced protein
  misc_feature: Homolog of GI Number: 21553934 NR Desc: probable wound
  misc_feature: Homolog of GI Number: 50928989 NR Desc: OSJNBa0043L09.18
  misc_feature: Homolog of GI Number: 6688818 NR Desc: putative wound

SEQ ID NO: 11019 - DNA, 665 bp, Zea mays
  misc_feature: Ceres CLONE ID no. 1706117
  misc_feature: Ceres CDNA ID no. 29191596
  CDS (213)..(482): REFERENCED BY SEQ ID NO: 11020
gctgatgccgacttgcaaagccaccagcaagagactcctctcttatcccgtcgtcctcttctctcgcctccaataattcgtaaccattctccttccaggccgggctcctgctggccggagttcccatctccctctttccttctcggttactatctgtgagtgtgcctgcccccgtgtgtgcgcgtgcaagatcgaccgggcgcagcttgacgatggggcgcggcaaggtagtgatccgccggatcgacaactccacgagccggcaggtgacgttctccaagcggcggaacgggatcttcaagaaggcaagggagctcgccatcctctgcgacgcaggggtcgggttggtcatcttctccagcaccggtcggctctacgaatacgccagcacaagcataaagtcagtgattgatcgatatggtcgagcaaaggaggaggagcatgtagcagaccccaacacagagcttaaggtacaccactaaaagtgatcatatagcaacaaaaattagctaaatattgatcaattccatcatgttgttttgcagtaacactaggttcttgatttttcttatgttccttagaattagaatttcctattaacagtttagcaaataaagatgataataaagaggtgataaatcataacagaaaaaaaaaaaaaaaaa

SEQ ID NO: 11020 - protein, 89 aa, Zea mays
  misc_feature: Ceres CLONE ID no. 1706117
  misc_feature: Ceres CDNA ID no. 29191596
  misc_feature: Useful for making plants with modulated growth and phenotype characteristics
  misc_feature: The sequence is a functional homolog of  SEQ ID NO 1701 in the  10/412,699 US patent application
  misc_feature (9)..(59): Pfam Name: SRF PFAM Desc: SRF
  misc_feature: Homolog of GI Number: 38567704 NR Desc: B1358B12.2
  misc_feature: Homolog of GI Number: 50924820 NR Desc: OSJNBa0072F16.13
  misc_feature: Homolog of GI Number: 9964296 NR Desc: MADS box protein 2
  misc_feature: Homolog of GI Number: 29611976 NR Desc: MADS
  misc_feature: Homolog of GI Number: 50253302 NR Desc: putative transcription factor MADS27
  misc_feature: Homolog of GI Number: 45385968 NR Desc: MADS
  misc_feature: Homolog of GI Number: 30313677 NR Desc: transcription factor MADS27
  misc_feature: Homolog of GI Number: 30313689 NR Desc: transcription factor MADS57
  misc_feature: Homolog of GI Number: 50912427 NR Desc: transcription factor MADS57
  misc_feature: Homolog of GI Number: 34452085 NR Desc: MADS
MGRGKVVIRRIDNSTSRQVTFSKRRNGIFKKARELAILCDAGVGLVIFSSTGRLYEYASTSIKSVIDRYGRAKEEEHVADPNTELKVHH

SEQ ID NO: 11021 - DNA, 1046 bp, Zea mays
  misc_feature: Ceres CLONE ID no. 1706371
  misc_feature: Ceres CDNA ID no. 36707496
  CDS (79)..(639): REFERENCED BY SEQ ID NO: 11022
aagaagcaagaaaactagaaaaggctcctcccgaccgcaacgcccctcatctccctcgaccccgacatccccgacccgatggcgcccaaggcggagaagaagccagcggagaagaagccggcggccgaggagaaggcggagaagacgaccgcagggaagaagcccaaggccgagaagcggctgcccgcgtccaagtcctccggcaaggagggcggcgagaagaaggggaagaagaaggccaagaagagcgtggagacctacaagatctacatcttcaaggtgctgaagcaggtgcaccccgacatcggcatatcctccaaggccatgtccatcatgaactccttcatcaacgacatctttgagaagctggccggcgaggccgccaagctggcgcggtacaacaagaagcccaccatcacgtcccgcgagatccagacctccgtgcgcctagtcctccccggagagctcgccaagcacgccgtctccgagggagacgtagatggcggcttcggaggcggcagcggcggcggcaacaccggtgacgccgacagaggggacggtgatcgcgatccacagcctggaggagtggagcatccagatcgaggaggccaacagcgccaagaagctggtggtgattgacttcactgcaacatggtgtcctccgtgccgcgccatggctccaatttttgctgatatggccaagaagtccccaaatgttgttttcctgaaagttgatgtggatgaaatgaagaccattgctgagcaattcagcgtagaggccatgccaacattcctgttcatgagggagggcgacgtcaaggacagggtcgttggcgcagcaaaggaagagctagcaaggaagcttgaactacacatggcctcgtagatcagtgatgccgtaatgtagtattcgcctaaataagaggacgcctcgcctcaactctgagaaaactagtgcttctgtgatggtaattcgtatgagagagtgccccctttggtggtacttcttcgtatgtagtattaaggaaaaaaaaaaaaaaaaaaaa

SEQ ID NO: 11022 - protein, 128 aa, Zea mays; identical to SEQ ID NO: 6674
  misc_feature: Ceres CLONE ID no. 1706371
  misc_feature: Ceres CDNA ID no. 36707496
  misc_feature (21)..(127): Pfam Name: Thioredoxin PFAM Desc: Thioredoxin
  misc_feature: Homolog of GI Number: 21801 NR Desc: histone H2B
  misc_feature: Homolog of GI Number: 66841002 NR Desc: thioredoxin h1 protein
  misc_feature: Homolog of GI Number: 577825 NR Desc: H2B histone
  misc_feature: Homolog of GI Number: 22325 NR Desc: H2B histone
  misc_feature: Homolog of GI Number: 1708107 NR Desc: Histone H2B
  misc_feature: Homolog of GI Number: 22323 NR Desc: H2B histone
  misc_feature: Homolog of GI Number: 50947133 NR Desc: putative Histone H2B.2
  misc_feature: Homolog of GI Number: 34895888 NR Desc: putative histone H2B
  misc_feature: Homolog of GI Number: 34895838 NR Desc: putative histone H2B
  misc_feature: Homolog of GI Number: 34895832 NR Desc: putative histone H2B

SEQ ID NO: 11023 - DNA, 590 bp, Zea mays
  misc_feature: Ceres CLONE ID no. 1706397
  misc_feature: Ceres CDNA ID no. 36707009
  CDS (70)..(381): REFERENCED BY SEQ ID NO: 11024
atcgcacaaatcctcttcctcgagttctcctcaaccaaattcaaagtcacagcggcgaaactctcggcgatgtctggccgcggcaagggcgggaagggtctgggcaagggcggcgccaagcgccaccgcaaggtgctgcgtgacaacatccagggcatcaccaagccggcgatccgcaggttggcgaggaggggcggcgtcaagcgcatctccgggctcatctacgaggagacccgcggcgtgctcaagatcttcctcgagaacgtcatccgcgacgccgtcacctacaccgagcacgcccgccgcaagactgtgaccgccatggacgttgtctacgctctcaagcgccagggccgcaccctctacggtttcggcggttaggtcgcccctctcccggtggcgaattacgtggtggcggtggcggtcgtgttgtgttcttggtctagttagtctgtgtcgtctttatcggtgctgttttctgtggtggttgtactgcatcgttctagtttctagtccatgtgctgtaatatctcgctgctgtaatcaatggaatgtcctcgtttcaagcccaaaaaaaaaaaaaaaaaaaa

SEQ ID NO: 11024 - protein, 103 aa, Zea mays; identical to SEQ ID NO: 8
  misc_feature: Ceres CLONE ID no. 1706397
  misc_feature: Ceres CDNA ID no. 36707009
  misc_feature (66)..(92): Pfam Name: TAF PFAM Desc: TATA box binding protein associated factor
  misc_feature: Homolog of GI Number: 74004256 NR Desc:  similar to germinal histone H4 gene
  misc_feature: Homolog of GI Number: 61834317 NR Desc:  similar to germinal histone H4 gene
  misc_feature: Homolog of GI Number: 74004178 NR Desc:  similar to germinal histone H4 gene
  misc_feature: Homolog of GI Number: 68441417 NR Desc:  similar to germinal histone H4 gene
  misc_feature: Homolog of GI Number: 61820747 NR Desc:  similar to germinal histone H4 gene
  misc_feature: Homolog of GI Number: 57098917 NR Desc:  similar to germinal histone H4 gene
  misc_feature: Homolog of GI Number: 50911547 NR Desc: histone H4
  misc_feature: Homolog of GI Number: 74004228 NR Desc:  similar to germinal histone H4 gene
  misc_feature: Homolog of GI Number: 68441405 NR Desc:  similar to histone H2A
  misc_feature: Homolog of GI Number: 62663604 NR Desc:  similar to Histone H2B 291B

SEQ ID NO: 11025 - DNA, 506 bp, Zea mays
  misc_feature: Ceres CLONE ID no. 1706440
  misc_feature: Ceres CDNA ID no. 36707010
  CDS (68)..(310): REFERENCED BY SEQ ID NO: 11026
agtgagtacagagagtagccttacgtagcgaagctcagagcaagcgagggtacggtcaaggggggtgatggcgctgtctcgacgcatggcggctcccgtcctcgtcctcatgctcctcctcgtcgccacagagctggggacgaccaaggtggcggaggcgaggcactgcctgtcgcagagccaccggttcaagggcctgtgcatgagcagcaacaactgcgccaacgtgtgccagaccgagaacttccccggcggcgagtgtaaggcggagggcgccacgcgcaagtgcttctgcaagaagatatgctagtagtagcctcggctttgctggcacaagcaggtcgtcggcacgcaacgcaattcaagcatcatatcggtcctcctcccgcgttgctgtctactcgaccccgttttctctttcgatcgatttcgttgtttcctgttgctctcttcttttcccgcgaataatatgctccatgggatcacaaaaaaaaaaaaaaaaaaaa

SEQ ID NO: 11026 - protein, 80 aa, Zea mays; identical to SEQ ID NO: 256
  misc_feature: Ceres CLONE ID no. 1706440
  misc_feature: Ceres CDNA ID no. 36707010
  misc_feature (32)..(80): Pfam Name: Gamma PFAM Desc: Gamma
  misc_feature: Homolog of GI Number: 50910773 NR Desc: putative defensin
  misc_feature: Homolog of GI Number: 60729566 NR Desc: defensin 1 precursor
  misc_feature: Homolog of GI Number: 50926554 NR Desc: OSJNBa0019D11.21
  misc_feature: Homolog of GI Number: 24306004 NR Desc: defensin EGAD1
  misc_feature: Homolog of GI Number: 17066707 NR Desc: defensin protein precursor
  misc_feature: Homolog of GI Number: 533692 NR Desc: protease inhibitor
  misc_feature: Homolog of GI Number: 32400845 NR Desc: proteinase inhibitor Rgpi9
  misc_feature: Homolog of GI Number: 16225423 NR Desc: putative gamma
  misc_feature: Homolog of GI Number: 7939581 NR Desc: thionin like protein
  misc_feature: Homolog of GI Number: 61189792 NR Desc: defensin

SEQ ID NO: 11027 - DNA, 612 bp, Zea mays
  misc_feature: Ceres CLONE ID no. 1706496
  misc_feature: Ceres CDNA ID no. 36707243
  CDS (148)..(384): REFERENCED BY SEQ ID NO: 11028
cgctgttcgtgtgtgttcttgttgtgattgtgctagcgtgtccgtgacctgtgacggtgcaggcatctgaaaggcgaggacctgaactccctgcagcccagggagctgatcgctattgaagagggcctccagaatgggcagaccaacatgcgcgagaagcagatggactactggaggatgcacaagacgaatgggaagatgctggaggacgaacacaagatactgacttttaggatgcaccaacaggctgttgatctgagcggcggcatgagggagctggagaccggataccatcaggtccagcacgacagggatttcatttcccagatgccgttcaccttccgggtgcagcccaaccaccccaacctgcaggaagacgagtagctacagcctgctggatagtgttctgcatgccgctctgaactgaagctgcaggaagacgagtagctacagcctgctggatagtgttctgcatgccgctctgaactggagctcctcacctgcagcttctatctcgcgtttcatcattcagcgttagctgggtatctttcttttcatggcaccctggatgaagtctgtcacttgttactacaaaaaaaaaaaaaaaaaaaa

SEQ ID NO: 11028 - protein, 78 aa, Zea mays
  misc_feature: Ceres CLONE ID no. 1706496
  misc_feature: Ceres CDNA ID no. 36707243
  misc_feature: Homolog of GI Number: 13274182 NR Desc: putative MADS
  misc_feature: Homolog of GI Number: 13274180 NR Desc: putative MADS
  misc_feature: Homolog of GI Number: 2961437 NR Desc: MADS box protein
  misc_feature: Homolog of GI Number: 53980849 NR Desc: putative MADS box protein
  misc_feature: Homolog of GI Number: 44888601 NR Desc: PISTILLATA
  misc_feature: Homolog of GI Number: 45356041 NR Desc: PISTILLATA
  misc_feature: Homolog of GI Number: 13274178 NR Desc: putative MADS
  misc_feature: Homolog of GI Number: 50902198 NR Desc: MADS box protein
  misc_feature: Homolog of GI Number: 45385970 NR Desc: MADS
  misc_feature: Homolog of GI Number: 45356043 NR Desc: PISTILLATA
MREKQMDYWRMHKTNGKMLEDEHKILTFRMHQQAVDLSGGMRELETGYHQVQHDRDFISQMPFTFRVQPNHPNLQEDE

SEQ ID NO: 11029 - DNA, 659 bp, Zea mays
  misc_feature: Ceres CLONE ID no. 1706542
  misc_feature: Ceres CDNA ID no. 36706876
  CDS (78)..(389): REFERENCED BY SEQ ID NO: 11030
aaccagagtcaccgcggcgagttcaaatcccacaatcttcttgtagcacaccactgtcttcgtccaactcggcggcgatgtctgggcgcggcaagggcggcaaggggctgggcaagggcggcgcgaaacgccaccgtaaggttctccgcgacaacatccagggtatcacgaagccggcaatccggaggctggcgaggaggggcggcgtgaagcgtatctccgggcttatctacgaggaaacccgcggcgtgctcaagatcttcctcgagaatgtcatccgcgacgcggtcacctacaccgagcacgctcgccgcaagaccgtcaccgccatggatgttgtgtacgccctcaagcgccagggccgcactctgtacgggttcggtggttgagcgcatctcttccctcgtctgcagcggctgccggtggcgtttcctcagttccctctgccttgcttggcttgatgtagagagttatcagattaaaatatctctgatgtgcttcgttattgggtggaatcatgtgtcccagcagtgctgggaaatcaagatcaagatgtatctttctttgcagtaatgaaatgttaaaatcgagatcaagatgtatctttctttgcagtaaagaaactttgctattgcgcccaaaaaaaaaaaaaaaaaaaa

SEQ ID NO: 11030 - protein, 103 aa, Zea mays; identical to SEQ ID NO: 8
  misc_feature: Ceres CLONE ID no. 1706542
  misc_feature: Ceres CDNA ID no. 36706876
  misc_feature (66)..(92): Pfam Name: TAF PFAM Desc: TATA box binding protein associated factor
  misc_feature: Homolog of GI Number: 57106967 NR Desc:  similar to germinal histone H4 gene
  misc_feature: Homolog of GI Number: 61835903 NR Desc:  similar to germinal histone H4 gene
  misc_feature: Homolog of GI Number: 62663604 NR Desc:  similar to Histone H2B 291B
  misc_feature: Homolog of GI Number: 76631272 NR Desc:  similar to germinal histone H4 gene
  misc_feature: Homolog of GI Number: 74004256 NR Desc:  similar to germinal histone H4 gene
  misc_feature: Homolog of GI Number: 74004178 NR Desc:  similar to germinal histone H4 gene
  misc_feature: Homolog of GI Number: 57098917 NR Desc:  similar to germinal histone H4 gene
  misc_feature: Homolog of GI Number: 68441417 NR Desc:  similar to germinal histone H4 gene
  misc_feature: Homolog of GI Number: 61820747 NR Desc:  similar to germinal histone H4 gene
  misc_feature: Homolog of GI Number: 50729214 NR Desc:  similar to germinal histone H4 gene

SEQ ID NO: 11031 - DNA, 577 bp, Zea mays
  misc_feature: Ceres CLONE ID no. 1706668
  misc_feature: Ceres CDNA ID no. 36707292
  CDS (75)..(386): REFERENCED BY SEQ ID NO: 11032
aacaacaacagcaacccgcacaagccctcttcctcgattttcctcctccgtccgcgtagttctcggtttcggcgatgtcggggcgcggcaagggcggcaaggggctgggcaagggcggcgccaagcgccaccgcaaggtgctgcgcgacaacatccagggcatcacgaagccggcgatccgtaggctggccaggaggggcggcgtcaagcgcatttctgggctcatctacgaggaaacccgcggcgtgctcaagatcttcctcgagaacgtcatccgcgacgccgtcacctacaccgagcacgcccgccgcaagactgtcaccgccatggatgtcgtctacgcgctcaagcgccagggccggacgctctacggcttcggcggctaggccgcctccccttctgatgctttgatatgacggccgtggtcggttgtgtgtctagttggccggtctactgtagtttgttctgtatcttcgtttcgaggtgttccagtttctagcccatttggtgtaatattttcacagctattatcaatggaaagccctcggttctatccacaaaaaaaaaaaaaaaaaaa

SEQ ID NO: 11032 - protein, 103 aa, Zea mays; identical to SEQ ID NO: 8
  misc_feature: Ceres CLONE ID no. 1706668
  misc_feature: Ceres CDNA ID no. 36707292
  misc_feature (66)..(92): Pfam Name: TAF PFAM Desc: TATA box binding protein associated factor
  misc_feature: Homolog of GI Number: 74004256 NR Desc:  similar to germinal histone H4 gene
  misc_feature: Homolog of GI Number: 74004178 NR Desc:  similar to germinal histone H4 gene
  misc_feature: Homolog of GI Number: 61820747 NR Desc:  similar to germinal histone H4 gene
  misc_feature: Homolog of GI Number: 57098917 NR Desc:  similar to germinal histone H4 gene
  misc_feature: Homolog of GI Number: 50728590 NR Desc:  similar to germinal histone H4 gene
  misc_feature: Homolog of GI Number: 50911547 NR Desc: histone H4
  misc_feature: Homolog of GI Number: 74004228 NR Desc:  similar to germinal histone H4 gene
  misc_feature: Homolog of GI Number: 62648434 NR Desc:  similar to germinal histone H4 gene
  misc_feature: Homolog of GI Number: 61810551 NR Desc:  similar to Hist1h4i protein
  misc_feature: Homolog of GI Number: 76651053 NR Desc:  similar to germinal histone H4 gene

SEQ ID NO: 11033 - DNA, 557 bp, Zea mays
  misc_feature: Ceres CLONE ID no. 1706684
  misc_feature: Ceres CDNA ID no. 36706908
  CDS (68)..(310): REFERENCED BY SEQ ID NO: 11034
agtgagtacagagagtagccttacgtagcgaagctcagagcaagcgagggtacggtcaaggggggtgatggcgctgtctcgacgcatggcggctcccgtcctcgtcctcatgctcctcctcgtcgccacagagctggggacgaccaaggtggcggaggcgaggcactgcctgtcgcagagccaccggttcaagggcctgtgcatgagcagcaacaactgcgccaacgtgtgccagaccgagaacttccccggcggcgagtgtagggcggagggcgccacgcgcaagtgcttctgcaagaagatatgctagtagtagcctcggctttgctggcacaagcaggtcgtcggcacgcaacgcaattcaagcatcatatcggtcctcctcccgcgttgctgtctactcgaccccgttttctctttcgatcgatttcgttgtttcctgttgctctcttcttttcccgcgaataatatgctccatgggatctcactgttgtactttctgcatccgttggtagtcaggacgatccttcttccctcaaaaaaaaaaaaaaaaaaaa

SEQ ID NO: 11034 - protein, 80 aa, Zea mays
  misc_feature: Ceres CLONE ID no. 1706684
  misc_feature: Ceres CDNA ID no. 36706908
  misc_feature (32)..(80): Pfam Name: Gamma PFAM Desc: Gamma
  misc_feature: Homolog of GI Number: 50910773 NR Desc: putative defensin
  misc_feature: Homolog of GI Number: 60729566 NR Desc: defensin 1 precursor
  misc_feature: Homolog of GI Number: 50926554 NR Desc: OSJNBa0019D11.21
  misc_feature: Homolog of GI Number: 24306004 NR Desc: defensin EGAD1
  misc_feature: Homolog of GI Number: 17066707 NR Desc: defensin protein precursor
  misc_feature: Homolog of GI Number: 533692 NR Desc: protease inhibitor
  misc_feature: Homolog of GI Number: 32400845 NR Desc: proteinase inhibitor Rgpi9
  misc_feature: Homolog of GI Number: 16225423 NR Desc: putative gamma
  misc_feature: Homolog of GI Number: 7939581 NR Desc: thionin like protein
  misc_feature: Homolog of GI Number: 61189792 NR Desc: defensin
MALSRRMAAPVLVLMLLLVATELGTTKVAEARHCLSQSHRFKGLCMSSNNCANVCQTENFPGGECRAEGATRKCFCKKIC

SEQ ID NO: 11035 - DNA, 578 bp, Zea mays
  misc_feature: Ceres CLONE ID no. 1706706
  misc_feature: Ceres CDNA ID no. 36706909
  CDS (75)..(386): REFERENCED BY SEQ ID NO: 11036
aacaacaacagcaacccgcacaagccctcttcctcgattttccccctccgtccgcgtagttctcggtttcggcgatgtcggggcgcggcaagggcggcaaggggctgggcaagggcggcgccaagcgccaccgcaaggtgctgcgcgacaacatccagggcatcacgaagccggcgatccgtaggctggccaggaggggcggcgtcaagcgcatttctgggctcatctacgaggaaacccgcggcgtgctcaagatcttcctcgagaacgccatccgcgacgccgtcgcctacaccgagcacgtccgccgcaagactgtcaccgccatggatgtcgtctacgcgctcaagcgccagggccggacgctctacggcttcggcggctaggccgcctccccttctgatgctttgatatgacggccgtggtcggttgtgtgtctagttggccggtctactgtagtttgttctgtatcttcgtttcgaggtgttccagtttctagcccatttggtgtaatattttcacagctattatcaatggaaagccctcggttctatccagaaaaaaaaaaaaaaaaaaaa

SEQ ID NO: 11036 - protein, 103 aa, Zea mays
  misc_feature: Ceres CLONE ID no. 1706706
  misc_feature: Ceres CDNA ID no. 36706909
  misc_feature (25)..(96): Pfam Name: Histone PFAM Desc: Core histone H2A/H2B/H3/H4
  misc_feature: Homolog of GI Number: 74004256 NR Desc:  similar to germinal histone H4 gene
  misc_feature: Homolog of GI Number: 74004178 NR Desc:  similar to germinal histone H4 gene
  misc_feature: Homolog of GI Number: 61820747 NR Desc:  similar to germinal histone H4 gene
  misc_feature: Homolog of GI Number: 57098917 NR Desc:  similar to germinal histone H4 gene
  misc_feature: Homolog of GI Number: 50728590 NR Desc:  similar to germinal histone H4 gene
  misc_feature: Homolog of GI Number: 50911547 NR Desc: histone H4
  misc_feature: Homolog of GI Number: 74004228 NR Desc:  similar to germinal histone H4 gene
  misc_feature: Homolog of GI Number: 62648434 NR Desc:  similar to germinal histone H4 gene
  misc_feature: Homolog of GI Number: 61810551 NR Desc:  similar to Hist1h4i protein
  misc_feature: Homolog of GI Number: 50058194 NR Desc: histone H4
MSGRGKGGKGLGKGGAKRHRKVLRDNIQGITKPAIRRLARRGGVKRISGLIYEETRGVLKIFLENAIRDAVAYTEHVRRKTVTAMDVVYALKRQGRTLYGFGG

SEQ ID NO: 11037 - DNA, 545 bp, Zea mays
  misc_feature: Ceres CLONE ID no. 1706731
  misc_feature: Ceres CDNA ID no. 36706910
  CDS (166)..(471): REFERENCED BY SEQ ID NO: 11038
acctccaccctctaaaataagacgttgcagccaaccaggggaggccctccgcggtccgtggctccgtgccatcctctcctgggcagcgagcagtggtggccgcgggttcccccgcctcgtcctcccggatccggcgacgaagattaattgaataacttcgataagatgggtcgtggtattagcagtgggggtggtcagagttccttgggctatctctttggcagtgacgaagctccaaaatcatttgagaagcctgcaccagttcaaaagccaactcctccatcctctgcagagagactaaaagatatcgctgctggtattcaaagtagtaaatcaaacaattacaaaagatctgaaggccagaactgtggaaatttccttacggaccgtccgtcgaccaaggtgcaagcagctccaggtggcgactcttcactcggttatctttttagtggcagcaaagatggcaagtgatgtacacctgctgttagtgttcgccatgatcatgggagaaggtttctgcttaacaaaaaaaaaaaaaaaaaaaa

SEQ ID NO: 11038 - protein, 101 aa, Zea mays; identical to SEQ ID NO: 8972
  misc_feature: Ceres CLONE ID no. 1706731
  misc_feature: Ceres CDNA ID no. 36706910
  misc_feature: Homolog of GI Number: 21592628 NR Desc: putative nitrilase
  misc_feature: Homolog of GI Number: 21280823 NR Desc: putative nitrilase
  misc_feature: Homolog of GI Number: 2765837 NR Desc: NAP16kDa protein

SEQ ID NO: 11039 - DNA, 481 bp, Zea mays
  misc_feature: Ceres CLONE ID no. 1706797
  misc_feature: Ceres CDNA ID no. 36706911
  CDS (3)..(344): REFERENCED BY SEQ ID NO: 11040
atcaaggaacagtgcaaactagaagaaacccccgtcatcagcgacctctccccaacggcgccgacgatggcgcaacagcagacgcagctaaccactggctcgggcatcctggatgccgtcccgctcttcgtcgtcatcctcctcgcggcccacgtccaggccctcgtgttctggatgtacaagctggcttccgagaagcaaccaccccggaggaagacacagtgacggcgccgatctacgccatcggcgatccttcgctagcctctttatcggttccattttcatgtgaaccagttaccctccagaacattcaggccgtcaattattcagagatatccatatagtctttcaatttgttttatttatacttattgcattttgggtattgtttgataacaacttagcgatattctatgaatcactatccgtttgggtgatagataaatgttcctagttttagaccaaaaaaaaaaaaaaaaaa

SEQ ID NO: 11040 - protein, 52 aa, Zea mays
  misc_feature: Ceres CLONE ID no. 1706797
  misc_feature: Ceres CDNA ID no. 36706911
MAQQQTQLTTGSGILDAVPLFVVILLAAHVQALVFWMYKLASEKQPPRRKTQ

SEQ ID NO: 11041 - DNA, 531 bp, Zea mays
  misc_feature: Ceres CLONE ID no. 1706976
  misc_feature: Ceres CDNA ID no. 35383551
  CDS (18)..(272): REFERENCED BY SEQ ID NO: 11042
attcgcatattctcgcgatgggagcggaggaagcagagggtactcccccgccgctgcccgccaccggcgagcccgcaaccacggcaagggcgcagccaatatctgcagcacaattcctctcctggaagcagcgcaaggatgcagaggtagccgcaaggaaagctgaagcagctgagaagcgagctgatgatatcgcttcgggagcggcgcagatgaacggccgcgagctgttccaacatgagccctgggtgttcgacaacaacatttactgagatcgtgtcgggctactgttcctgcattagtccaagctccagcggtggtttcattttgtactgctatatcagctttgcgaaactgtggattttatttcaccgtttctaagattattctctcaataggtaattgaacttgtttcaaatacgttttgccaaatctttgtgcagtcaccgaatggtatctagtgtcgctattctttttctaaaactcttacaaacaaagagtattggtcggcaaaaaaaaaaaaaaaaaaaa

SEQ ID NO: 11042 - protein, 84 aa, Zea mays; identical to SEQ ID NO: 9404
  misc_feature: Ceres CLONE ID no. 1706976
  misc_feature: Ceres CDNA ID no. 35383551
  misc_feature: Homolog of GI Number: 9280685 NR Desc: F2E2.21

SEQ ID NO: 11043 - DNA, 1162 bp, Zea mays
  misc_feature: Ceres CLONE ID no. 1707438
  misc_feature: Ceres CDNA ID no. 36707625
  CDS (485)..(949): REFERENCED BY SEQ ID NO: 11044
aatccttatcctttccccacgattccttctctcctctcttgcgccgccgctggcccagcgcggccgccgtgctccttctccactcgtgcttcccaagctgcttcgccggaagcaatgcgagggccctgccccggtggaggcgtctcggcgtcttttgccccgagcttcaacggctcccgcgccatgatctgtaaattgcacgagacggatccgcatttcattcatccaaacagccaaaacggggccgttccgcgcaggcgacagggctacgggaggaatttgctatgctagccaggcggttgaattgctgcccactttgtaccctgaaatcgtggtccgagacgcacggctcgaggactgctgggaagtggctgacactcactgcagctcgttctttcctggttacaagttcccgttggaccttgttctccggattgatcgttacattgctctcctctctggattttcagttccacccggctgcatgaggacttgccttgtggccgtcaattctaattctgtaaatagtagtttcaacatcgagtgtggagatgctacagatgccaactttgagaaatacaatctcagtagaggctccgtagctggcattcttacacttgatacagtggcagactatcttccgagaaggggacccctgaagcagagaaggacaggtattgcgtatatagcaaacgtcgcggtgcggaaggaggagcgacggaaagggatcgcgaagatgttggtccaagaagcagaggctcgggcaaggagctggggatgccggtcgatggcactgcactgcgacgtaaacaacgtggccgcgctacgcctgtacagaaaccaaggcttcaagtgcatacgagtgccggaaggagctaaatggcccgaacccaagatagctaaaggagcggagtacaacttcatgatgaagctagtgcccaaggcttgagtcttgaaccttataagatctgactagggaaaaaaagggaaaggtttggccgtgtaggttctgcacggatgcacgatttgctctccattcatgtgtacagcatttggtgtatagtggaggctactttgtgatatataacagctacgtgttggtccatagtgagtgactgagggtgtcggtgtttaaaccatcccctaaaaaaaaaaaaaaaaa

SEQ ID NO: 11044 - protein, 154 aa, Zea mays
  misc_feature: Ceres CLONE ID no. 1707438
  misc_feature: Ceres CDNA ID no. 36707625
  misc_feature (31)..(123): Pfam Name: Acetyltransf_1 PFAM Desc: Acetyltransferase
  misc_feature: Homolog of GI Number: 50915658 NR Desc: GCN5
  misc_feature: Homolog of GI Number: 42571129 NR Desc: GCN5
  misc_feature: Homolog of GI Number: 30687743 NR Desc: GCN5
MRTCLVAVNSNSVNSSFNIECGDATDANFEKYNLSRGSVAGILTLDTVADYLPRRGPLKQRRTGIAYIANVAVRKEERRKGIAKMLVQEAEARARSWGCRSMALHCDVNNVAALRLYRNQGFKCIRVPEGAKWPEPKIAKGAEYNFMMKLVPKA

SEQ ID NO: 11045 - DNA, 1269 bp, Zea mays
  misc_feature: Ceres CLONE ID no. 1707570
  misc_feature: Ceres CDNA ID no. 36707626
  CDS (74)..(835): REFERENCED BY SEQ ID NO: 11046
aacagccaagctagcaactctctcgagtcgattcctaagcagctagccagtgactcgatcttagcgtgctacaatggcggcagctgctagtgccctgctcctcctgctctgctcagccttctgctcccttgcccaccgggcggccggcgtcgactacggctcgtggcagagcgcccacgccacgttctacggcggcggcgacgcgtctggcacgatgggcggcgcgtgcggctacgggaacatgtacagcacggggtacggcaccaacacggcggcgctgagcacggcgctgttcaacgacggcgccgcgtgcgggtcctgctacgagctgcgctgcgacaacaacgggcagtcgtgcctgccgggcaccatcaccgtcacggccaccaacttctgcccgcccaactacggcctccccagcgacgacggcggctggtgcaacccgccgcgcccgcacttcgacatggcccagccggccttcctccagatcgcgcagtaccgcgccggcatcgtgcccgtcgcctacaggagggtgccgtgcgtgaagaagggcgggatcaggttcaccatcaacggccactcctacttcaacctggtgctggtgaccaacgtggccggcgccggggacgtgcagtccgtgtccatcaagggctccagcaccgggtggcagcccatgtcccgcaactggggccagaactggcagagcaactcgctcctcgacggccagagcctgtccttccaggtcaccgccagcgacggccgcaccgtcaccagcaacggcgtcgctccggcgggctggcagttcggccagaccttcgagggcgcccagttctagctacgactactccatcgacgagtgtgactgtcagagcaagagagaaggagaaaccttcttcgctgtagtaaagaagaggctcccgccattccgaggctgcttattattagcacccgcttaggcatttccttctcttattattaccataggattgagctgtttattttctgcaccagtgattgtagcaatgggttaagcaaaacaaaaacctgcaaggctatttattgtagggctgcaggggagtggtgtcgtgcaacttattgtgttgttacgctgtactagtagcaacccccgaatctggccacatggtggtgggagatgtttgtggggattgcaccttttgggaccgtgaacatcaatgcttgtttatggtctattacatgcagtatatatgatatatataaaaaaaaaaaaaagaaaaaaaaaaaaaaaaa

SEQ ID NO: 11046 - protein, 253 aa, Zea mays
  misc_feature: Ceres CLONE ID no. 1707570
  misc_feature: Ceres CDNA ID no. 36707626
  misc_feature: null
  misc_feature: Useful for making plants with altered cell wall content and/or composition
  misc_feature (162)..(239): Pfam Name: Pollen_allerg_1 PFAM Desc: Pollen allergen
  misc_feature (66)..(151): Pfam Name: DPBB_1 PFAM Desc: Rare lipoprotein A
  misc_feature: Homolog of GI Number: 14193751 NR Desc: alpha
  misc_feature: Homolog of GI Number: 34907844 NR Desc: alpha
  misc_feature: Homolog of GI Number: 1041710 NR Desc: expansin Os
  misc_feature: Homolog of GI Number: 59544153 NR Desc: expansin EXPA11
  misc_feature: Homolog of GI Number: 1815681 NR Desc: expansin
  misc_feature: Homolog of GI Number: 50931781 NR Desc: alpha
  misc_feature: Homolog of GI Number: 38710245 NR Desc: expansin EXPA1
  misc_feature: Homolog of GI Number: 59544146 NR Desc: expansin EXPA10
  misc_feature: Homolog of GI Number: 59544179 NR Desc: expansin EXPA12
  misc_feature: Homolog of GI Number: 51039054 NR Desc: alpha
MAAAASALLLLLCSAFCSLAHRAAGVDYGSWQSAHATFYGGGDASGTMGGACGYGNMYSTGYGTNTAALSTALFNDGAACGSCYELRCDNNGQSCLPGTITVTATNFCPPNYGLPSDDGGWCNPPRPHFDMAQPAFLQIAQYRAGIVPVAYRRVPCVKKGGIRFTINGHSYFNLVLVTNVAGAGDVQSVSIKGSSTGWQPMSRNWGQNWQSNSLLDGQSLSFQVTASDGRTVTSNGVAPAGWQFGQTFEGAQF

SEQ ID NO: 11047 - DNA, 601 bp, Zea mays
  misc_feature: Ceres CLONE ID no. 1708375
  misc_feature: Ceres CDNA ID no. 36706912
  CDS (61)..(303): REFERENCED BY SEQ ID NO: 11048
acagagagtagccttacgtagcgaagctcagagcaagcgagggtacggtcaaggggggtgatggcgctgtctcgacgcatggcggctcccgtcctcgtcctcatgctcctcctcgtcgccacagagctggggacgaccaaggtggcggaggcgaggcactgcctgtcgcagagccaccggttcaagggcctgtgcatgagcagcaacaactgcgccaacgtgtgccagaccgagaacttccccggcggcgagtgtaaggcggagggcgccacgcgcaagtgcttctgcaagaagatatgctagtagtagcctcggctttgctggcacaagcaggtcgtcggcacgcaacgcaattcaagcatcatatcggtcctcctcccgcgttgctgtctactcgaccccgttttctctttcgatcgatttcgttgtttcctgttgctctcttcttttcccgcgaataatatgctccatgggatctcactgttgtactttctgcatccgttggtagtcaggacgatccttcttcccgctgtcacgtgtgattcaaaatggatgtactaatgcaactgttcgttcttccgaaaaaaaaaaaaaaaaaaaa

SEQ ID NO: 11048 - protein, 80 aa, Zea mays; identical to SEQ ID NO: 256
  misc_feature: Ceres CLONE ID no. 1708375
  misc_feature: Ceres CDNA ID no. 36706912
  misc_feature (32)..(80): Pfam Name: Gamma PFAM Desc: Gamma
  misc_feature: Homolog of GI Number: 50910773 NR Desc: putative defensin
  misc_feature: Homolog of GI Number: 60729566 NR Desc: defensin 1 precursor
  misc_feature: Homolog of GI Number: 50926554 NR Desc: OSJNBa0019D11.21
  misc_feature: Homolog of GI Number: 24306004 NR Desc: defensin EGAD1
  misc_feature: Homolog of GI Number: 17066707 NR Desc: defensin protein precursor
  misc_feature: Homolog of GI Number: 533692 NR Desc: protease inhibitor
  misc_feature: Homolog of GI Number: 32400845 NR Desc: proteinase inhibitor Rgpi9
  misc_feature: Homolog of GI Number: 16225423 NR Desc: putative gamma
  misc_feature: Homolog of GI Number: 7939581 NR Desc: thionin like protein
  misc_feature: Homolog of GI Number: 61189792 NR Desc: defensin

SEQ ID NO: 11049 - DNA, 446 bp, Zea mays
  misc_feature: Ceres CLONE ID no. 1708701
  misc_feature: Ceres CDNA ID no. 36706913
  CDS (77)..(217): REFERENCED BY SEQ ID NO: 11050
agcacgcacaccaatcgcccacaagcgctcgcaggagaggtcgaaaccctagcttttgcggcggcggcgagagaagatgatctacgacgtgaactcccccctcttccgttccttcctcagccagaagggcggcgccgacaagaggaaaatggaggagcataaaccaaaggagcagaggcccaaggctaacgagaacaagcctgtgatgaacgaatgaatatctccagaagctttgttcaatgtgcaaccaagtccgatgtccgtttgctctggtcagcttaaaaccaacgcttccaataatcctatattggtgtcttagtttccccttatagtgttatttgctcggcttgaacatggcaacggaaatgaaacttgaactacctatggtactgtcatcaatttgagactcccatggttgacaactttaaaaaaaaaaaaaaaaaaaa

SEQ ID NO: 11050 - protein, 46 aa, Zea mays; identical to SEQ ID NO: 10946
  misc_feature: Ceres CLONE ID no. 1708701
  misc_feature: Ceres CDNA ID no. 36706913
  misc_feature (1)..(46): Pfam Name: Wound_ind PFAM Desc: Wound
  misc_feature: Homolog of GI Number: 81888 NR Desc: wound
  misc_feature: Homolog of GI Number: 6642642 NR Desc: putative wound

SEQ ID NO: 11051 - DNA, 564 bp, Zea mays
  misc_feature: Ceres CLONE ID no. 1708726
  misc_feature: Ceres CDNA ID no. 36707012
  CDS (83)..(412): REFERENCED BY SEQ ID NO: 11052
agaagccaccctgccgcctcaccgcctctctcactctgagaccgcagatccgttgtccggtgagtggaagccgcacgaacccatggcctccggcgagcttgcctgcacctacgccgctctcatcctcagcgacgatggcatcgccatcaccgccgagaagatcgccacgatcgtgaaggcggccaacatcaaggtcgagtcctactggccggcactcttcgccaagctcctggagaagcgcaacgtcgaggacctcatcctctccgttggatctggtggcggagctgctccagttgctgctgccgcacctgctggtggtgctgcggctgctgctgccccggctgtcgaggagaagaaggaagaggccaaggaggagtctgatgacgacatgggcttcagcctgttcggctgaggagaccccctcacccagccattagcaaattttacttgtgctgtcaaagactatcttgtcttatgttatgtctctaggcttttgttacaactacccaagttttgagtttttgagatgtggctatggcatgaaccaaaaaaaaaaaaaaaaaa

SEQ ID NO: 11052 - protein, 109 aa, Zea mays
  misc_feature: Ceres CLONE ID no. 1708726
  misc_feature: Ceres CDNA ID no. 36707012
  misc_feature (21)..(108): Pfam Name: Ribosomal_60s PFAM Desc: 60s Acidic ribosomal protein
  misc_feature: Homolog of GI Number: 2431769 NR Desc: acidic ribosomal protein P1a
  misc_feature: Homolog of GI Number: 7440758 NR Desc: acidic ribosomal protein P1
  misc_feature: Homolog of GI Number: 50940517 NR Desc: putative acidic ribosomal protein P1a
  misc_feature: Homolog of GI Number: 57471718 NR Desc: ribosomal protein P1
  misc_feature: Homolog of GI Number: 78191426 NR Desc: acidic ribosomal protein P1a
  misc_feature: Homolog of GI Number: 21592477 NR Desc: acidic ribosomal protein
  misc_feature: Homolog of GI Number: 20465333 NR Desc: putative 60S acidic ribosomal protein P1
  misc_feature: Homolog of GI Number: 20258887 NR Desc: putative acidic ribosomal protein
  misc_feature: Homolog of GI Number: 21553441 NR Desc: 60S acidic ribosomal protein P1
  misc_feature: Homolog of GI Number: 21554797 NR Desc: acidic ribosomal protein p1
MASGELACTYAALILSDDGIAITAEKIATIVKAANIKVESYWPALFAKLLEKRNVEDLILSVGSGGGAAPVAAAAPAGGAAAAAAPAVEEKKEEAKEESDDDMGFSLFG

SEQ ID NO: 11053 - DNA, 674 bp, Zea mays
  misc_feature: Ceres CLONE ID no. 1708788
  misc_feature: Ceres CDNA ID no. 35383552
  CDS (82)..(531): REFERENCED BY SEQ ID NO: 11054
atcacttgcagcttcacaaacaagctaagcaagcatttatccagaaagaagagaaggaaccaagccaacaaccaaccaaccatgatgagcggcaagaggattgctcgtctggctaagaagtggcaaaggatggcggcacaacggaggcagcgcctcacctggggcggagcaggcgcggcagcaaagcaagccggcgagagctgcagctccgtggcgagcaagggccactgcgccgtgtacacggccgactgggcgcggttcgaggtgcccctggcgtgcctcagcactctggtcttcagggagctcctggaaatgtcgcaggaggagttcggcttctccggcggcgatggcagtggcaggatcacgctgccctgcgacacggcggtcatggagtacgccatgtgcttgctcaggaggagcgcctctgctgagctagagcaggcgttcctcagcaccgtggcggcaacgtcgtgcctgtacgccagccgcgtggcgccgtgcgtaggagcctgccagcgggttgctgtttagtgctgttcagtgtagtgtaggtagtagataaatattattcagaaccttctgatcctgcaaatgatcaaggaaggtgttagtgttctgtacgtatgtatgatgctggatataattggcttatgcaaaaaaaaaaaaaaaaaaaa

SEQ ID NO: 11054 - protein, 149 aa, Zea mays
  misc_feature: Ceres CLONE ID no. 1708788
  misc_feature: Ceres CDNA ID no. 35383552
  misc_feature (7)..(111): Pfam Name: Auxin_inducible PFAM Desc: Auxin responsive protein
  misc_feature: Homolog of GI Number: 32187718 NR Desc: auxin induced protein
  misc_feature: Homolog of GI Number: 45503973 NR Desc: putative small auxin up RNA
  misc_feature: Homolog of GI Number: 52076012 NR Desc: putative auxin induced protein
  misc_feature: Homolog of GI Number: 52076009 NR Desc: putative auxin induced protein
  misc_feature: Homolog of GI Number: 52076005 NR Desc: putative auxin induced protein
  misc_feature: Homolog of GI Number: 52076010 NR Desc: putative auxin induced protein
  misc_feature: Homolog of GI Number: 52076004 NR Desc: putative auxin induced protein
  misc_feature: Homolog of GI Number: 52076007 NR Desc: putative auxin induced protein
  misc_feature: Homolog of GI Number: 52076008 NR Desc: putative auxin induced protein
  misc_feature: Homolog of GI Number: 52076006 NR Desc: putative auxin induced protein
MMSGKRIARLAKKWQRMAAQRRQRLTWGGAGAAAKQAGESCSSVASKGHCAVYTADWARFEVPLACLSTLVFRELLEMSQEEFGFSGGDGSGRITLPCDTAVMEYAMCLLRRSASAELEQAFLSTVAATSCLYASRVAPCVGACQRVAV

SEQ ID NO: 11055 - DNA, 520 bp, Zea mays
  misc_feature: Ceres CLONE ID no. 1709045
  misc_feature: Ceres CDNA ID no. 36704244
  CDS (90)..(380): REFERENCED BY SEQ ID NO: 11056
cactcacgattggagtttcacctcggcagcccagccagccagtggttcctcggctcggaggaacaggcgaacagcaagagcttctgaagatgaaggcgatccccgtggctctcctgctcctcgtcctggttgctgccgcctcctcgttcaagcatctcgccgaggcagcagacggcggcgcggtgccggacggcgtgtgcgacggcaagtgccgcagccggtgctcgctgaagaaggccgggcggtgcatgggcctgtgcatgatgtgctgcggcaagtgccagggctgcgtgccgtcggggccgtacgccagcaaggacgagtgcccctgctacagggacatgaagtcccccaagaaccagcgccccaagtgcccctaggccctaccgctctaagggagggaggatgacccaggatttcgctcgcgatcctgcacagcttctagtcttgtactgctagtttagcgcgccgagcgtcggaatgtcgcgacggttcctcgtaaaaaaaaaaaaaaaaaaaa

SEQ ID NO: 11056 - protein, 96 aa, Zea mays; identical to SEQ ID NO: 2908
  misc_feature: Ceres CLONE ID no. 1709045
  misc_feature: Ceres CDNA ID no. 36704244
  misc_feature (1)..(96): Pfam Name: GASA PFAM Desc: Gibberellin regulated protein
  misc_feature: Homolog of GI Number: 66731525 NR Desc: GIR1
  misc_feature: Homolog of GI Number: 3355483 NR Desc: similar to gibberellin
  misc_feature: Homolog of GI Number: 14627134 NR Desc: snakin
  misc_feature: Homolog of GI Number: 50901380 NR Desc: putative  gibberellin regulated protein
  misc_feature: Homolog of GI Number: 2129596 NR Desc: gibberellin
  misc_feature: Homolog of GI Number: 28394019 NR Desc: putative gibberellin
  misc_feature: Homolog of GI Number: 16516821 NR Desc: gibberellin induced protein 3
  misc_feature: Homolog of GI Number: 44889867 NR Desc: GASA
  misc_feature: Homolog of GI Number: 25313155 NR Desc: protein F10A5.6

SEQ ID NO: 11057 - DNA, 644 bp, Zea mays
  misc_feature: Ceres CLONE ID no. 1709224
  misc_feature: Ceres CDNA ID no. 36706917
  CDS (88)..(498): REFERENCED BY SEQ ID NO: 11058
aacgcggcacagagcctcattcatctccattcgaaacaccctcgcacccacactctcccttcgtccccagcctaaatccccgcaacgatggctcgcacgaagcagacggcgcgcaagtccacgggcggcaaggccccgaggaagcagctggcgaccaaggcggcgcgcaagtcggcccctgcgaccggcggcgtgaagaagccgcaccgcttccgcccgggcaccgtggcgctgcgcgagatccgcaagtaccagaagagcacggagcttctcatccgcaagctgcccttccagcgcctggtccgcgagatcgcgcaggacttcaagaccgacctccgcttccagtcctccgccgtcgccgcgctgcaggaggccgccgaggcctacctcgtcggcctgttcgaggacaccaacctctgcgccatccacgccaagcgcgtcaccatcatgcccaaggacatccagctcgcccgccgcatccgcggggagcgcgcctaggcggccggccggataggccgtggcccgtggcgcaggctcttctcggaagtttgtactagtggtcgggtcgtgtggaaggagtggtgtactgatcagcaatgtctcaaaccatgtcaacctctttgttgtcatctaaaaaaaaaaaa

SEQ ID NO: 11058 - protein, 136 aa, Zea mays; identical to SEQ ID NO: 358
  misc_feature: Ceres CLONE ID no. 1709224
  misc_feature: Ceres CDNA ID no. 36706917
  misc_feature (58)..(134): Pfam Name: Histone PFAM Desc: Core histone H2A/H2B/H3/H4
  misc_feature: Homolog of GI Number: 59799581 NR Desc: Histone H3
  misc_feature: Homolog of GI Number: 1362108 NR Desc: histone H3 homolog
  misc_feature: Homolog of GI Number: 55775689 NR Desc: histone 3
  misc_feature: Homolog of GI Number: 50728592 NR Desc:  similar to histone protein Hist2h3c1
  misc_feature: Homolog of GI Number: 166384 NR Desc: histone H3
  misc_feature: Homolog of GI Number: 122083 NR Desc: Histone H3
  misc_feature: Homolog of GI Number: 68362812 NR Desc:  similar to CG31613
  misc_feature: Homolog of GI Number: 74004201 NR Desc:  similar to histone 1
  misc_feature: Homolog of GI Number: 73808028 NR Desc: histone H3
  misc_feature: Homolog of GI Number: 50729226 NR Desc:  similar to histone protein Hist2h3c1

SEQ ID NO: 11059 - DNA, 551 bp, Zea mays
  misc_feature: Ceres CLONE ID no. 1709315
  misc_feature: Ceres CDNA ID no. 36707630
  CDS (89)..(409): REFERENCED BY SEQ ID NO: 11060
accacagcatccgcagttccccgaccacaccgttcctccgagcccaggagcagccccgcgccaggaggaagtttgttcttttaacaatatgtcgagggaggagaatgtttacatggccaagttggctgagcaggctgaaaggtatgaggagatggttgagtatatggagaaggtggctaagactgtagatgtggaagagctcactgttgaggagcgtaaccttctgtctgttgcatacaagaatgtgattggggctcgccgcgcttcatggcgcattgtttcttccattgaacaaaaggaggagtcccgtaagaacgaagagcatgtgaaccttatcaaggaatatcgtggcaagatcgaggctgaactgagcaatatctgtgatggaatcttgaagctgctatattagagttactttttgtctaaagcctgaacattttcaaagaatttgaatatctgaatatttgaatatttgtgctgagtttttcgaagaatttgaatatctgaacaattgaataaaaaaaaaaaaaaaaaaaaaaaaaaaaaaaaaa

SEQ ID NO: 11060 - protein, 106 aa, Zea mays
  misc_feature: Ceres CLONE ID no. 1709315
  misc_feature: Ceres CDNA ID no. 36707630
  misc_feature (3)..(105): Pfam Name: 14 PFAM Desc: 14
  misc_feature: Homolog of GI Number: 37903393 NR Desc: 14
  misc_feature: Homolog of GI Number: 46946654 NR Desc: 14
  misc_feature: Homolog of GI Number: 51964902 NR Desc: PREDICTED OJ1124_B05.7 gene product
  misc_feature: Homolog of GI Number: 53794211 NR Desc: putative 14
  misc_feature: Homolog of GI Number: 6179981 NR Desc: 14
  misc_feature: Homolog of GI Number: 2921512 NR Desc: GF14 protein
  misc_feature: Homolog of GI Number: 44917151 NR Desc: 14
  misc_feature: Homolog of GI Number: 44917153 NR Desc: 14
  misc_feature: Homolog of GI Number: 2689479 NR Desc: 14
  misc_feature: Homolog of GI Number: 2266662 NR Desc: 14
MSREENVYMAKLAEQAERYEEMVEYMEKVAKTVDVEELTVEERNLLSVAYKNVIGARRASWRIVSSIEQKEESRKNEEHVNLIKEYRGKIEAELSNICDGILKLLY

SEQ ID NO: 11061 - DNA, 787 bp, Zea mays
  misc_feature: Ceres CLONE ID no. 1709392
  misc_feature: Ceres CDNA ID no. 36707499
  CDS (1)..(324): REFERENCED BY SEQ ID NO: 11062
gctcgcgttaggccactccgccgttcgcgacctgtcacttcctgtccgtccccctgccgcacgccaccggagctcactcaccgattagtccccacctcagaccctctccgcgcgcgcccagtccggcggccgccctgcccaacgctagggtttaggtggcggctgcagggtcacgccggcgccctccgccctccaccggccgccgacagaaggggtgacgtaggtcacctcgcttttccttggcgagccgtctgtctgttggtgtcggcccgacaaacgccgaggagggagacagcgagatgccgcaccgagcgcgcccgatgacggggctgctggtgttcatgggcgttaacctcgcgctcttcaacaccatcagccccgtctacgacttcgtctgcttccacccctactgggaacgaaggagagaacgccgccgaagggaacttgaagctctgcgggcgaaaggatctctagagacaactaactaaattctcctaaagtcggcatcggagatgatgtctttgattttatcggcgtcatacaacccttgctccttcaaggcgtgctcaagctcttctttagtaatgtacctgtgagataaacgaattatatatgtgtcctgttatgatatgtgtcgtccagaattcaggtaccagctgtatcattttaacgttcaacttacccgctgttgtccttgtcgaaatactggaatgctgtgtaaaggtgctcttctctatccagtttgttcatatgcactgttgcggtgacaaaaaaaaaaaaaaaaaaa

SEQ ID NO: 11062 - protein, 62 aa, Zea mays
  misc_feature: Ceres CLONE ID no. 1709392
  misc_feature: Ceres CDNA ID no. 36707499
MPHRARPMTGLLVFMGVNLALFNTISPVYDFVCFHPYWERRRERRRRELEALRAKGSLETTN

SEQ ID NO: 11063 - DNA, 550 bp, Zea mays
  misc_feature: Ceres CLONE ID no. 1709463
  misc_feature: Ceres CDNA ID no. 35383553
  CDS (52)..(342): REFERENCED BY SEQ ID NO: 11064
ccgacaccgacgcgacagccgacaaggcagggggagaggccgagaggggaaatggcatcgttgtcccgcaccgctgctgccgctgtcgtggccctgaggtcggcggtccgctccgcgccccttaccggccgcgtcctcggagcgccactaccttcctttgcctcgccttccgctacccgctccgcccggatcctccgcaggtcggcggccgcggcgtcggcggggctggaaacgctaatgccgctgcacagcgcggtggctgccgcgcggcttaggtcctgcatcgccgtcgactcctcctgctggtgctcgctctcacaaggatatgctttgcctttatgacagcgaggcgagctgcacctgaagaaacaaaagaatcttaggaattacaaacaagggctgtactgtaataatatggttcttgtaaaccaattttgccttagaattctgtaacttgaatcatccacagatgtgcgactgtcttttgtttatgtggatctatgaattacctgccgctcctcgtttgaacgaaaaaaaaaaaaaaaaaaaa

SEQ ID NO: 11064 - protein, 96 aa, Zea mays; identical to SEQ ID NO: 9572
  misc_feature: Ceres CLONE ID no. 1709463
  misc_feature: Ceres CDNA ID no. 35383553
  misc_feature: Homolog of GI Number: 34913910 NR Desc: OSJNBa0024F24.29

SEQ ID NO: 11065 - DNA, 520 bp, Zea mays
  misc_feature: Ceres CLONE ID no. 1709549
  misc_feature: Ceres CDNA ID no. 36707017
  CDS (74)..(244): REFERENCED BY SEQ ID NO: 11066
agtgctcaccgaactccatctatctcttccccacgagcgcttgtggcggcggcggcggcggaattaggaggcgatggggcactccaacgtctggaactcgcaccccaagaactacgggcccggatcccgcgtctgccgtgtctgtgcgaaccctcatggactgatcaggaagtacgggctgatgtgctgcaggcagtgcttccgcagcaatgccaaggacattggcttcatcaagtaccgctgaaatcaggtgggaaattgtggtagaggcgaggctgtagttttatttccagtaatttagatgttttgttcagaagtctgctagtaaagactgctacgtttatgatggagaacttagccatgttggtcatgttggtcatattgatcatgagttacctatgttgagcttaaactatcttgtgtccaaccgtcgctgggtagtatgattactgtaatgtaggatggttaaggtcgcaaactaatacttaaattgcatgtgtaaaaaaaaaaaaaaaaaaaa

SEQ ID NO: 11066 - protein, 56 aa, Zea mays; identical to SEQ ID NO: 454
  misc_feature: Ceres CLONE ID no. 1709549
  misc_feature: Ceres CDNA ID no. 36707017
  misc_feature (3)..(56): Pfam Name: Ribosomal_S14 PFAM Desc: Ribosomal protein S14p/S29e
  misc_feature: Homolog of GI Number: 31745220 NR Desc: putative ribosomal protein S29
  misc_feature: Homolog of GI Number: 77555907 NR Desc: ribosomal protein S14p/S29e
  misc_feature: Homolog of GI Number: 57471722 NR Desc: ribosomal protein S29
  misc_feature: Homolog of GI Number: 13194826 NR Desc: putative ribosomal S29 protein
  misc_feature: Homolog of GI Number: 51970282 NR Desc: ribosomal S29 subunit
  misc_feature: Homolog of GI Number: 51971827 NR Desc: ribosomal S29 subunit
  misc_feature: Homolog of GI Number: 61654760 NR Desc: S29
  misc_feature: Homolog of GI Number: 47026945 NR Desc: ribosomal protein S29
  misc_feature: Homolog of GI Number: 32400973 NR Desc: ribosome protein S29

SEQ ID NO: 11067 - DNA, 601 bp, Zea mays
  misc_feature: Ceres CLONE ID no. 1709894
  misc_feature: Ceres CDNA ID no. 35383554
  CDS (205)..(396): REFERENCED BY SEQ ID NO: 11068
gcgtttcgttgtttcctccccaacttccaacacgcctcgatctagatccactcttcccccttctccttccggtcctccccccgagactattcatataggcgggtaggcgtccgaggcctcgtttgttctcggcttcttgtctccaagggtgctactccgtccgcgcttggtctgctctcgtccttccggaggccgcggcgcaacatggcgaagatcaagccgaaggccttgctcgcgcaaagcaaggtgaagaaggtccccggccaaatcagcgtggccacgatcgtcacctacatgatcctcggcgtcctggtcgtgtcctccgtttacgctgcctacaggtactgctgggcagtcacaggagcagcggaggcagtgggcgcccaggggaactgatcccccttccgactgcgtggctgatctcgctgttgttgtatcatccggttggggtaaaatttttggttgttgctgtctagcaaatggggttcatgggacatggataggttgtatgttgatacggttacaccgtagccgatgatatgtatgttgaatttcttcccttttattatcatttgacgagcaaaaaaaaaaaaaaaaaaaa

SEQ ID NO: 11068 - protein, 63 aa, Zea mays; identical to SEQ ID NO: 10090
  misc_feature: Ceres CLONE ID no. 1709894
  misc_feature: Ceres CDNA ID no. 35383554

SEQ ID NO: 11069 - DNA, 529 bp, Zea mays
  misc_feature: Ceres CLONE ID no. 1709955
  misc_feature: Ceres CDNA ID no. 36707249
  CDS (2)..(304): REFERENCED BY SEQ ID NO: 11070
cccatcccattgctcgttctgtcccttcgttcacagcctcctccacgaccaaacgatccgggttccagcggcggcggcggcggcgaagatgatcataccggtgcgctgcttcacctgcggcaaggtgattgggaacaagtgggacctctacctcgacctcctccaggccgactactcggaaggggatgctctggatgctttggaattgttccgctactgctgcaggcgaatgctcatgacccatgttgacctcattgagaagttgctcaactacaacacactggagaagaccgagacaagttaagtgagcaagcatatcatgctctgaaagcactactgtttcgtagtatcatatatattgtaggcggtatgttgtttcttctctatcaggagaggattgttgtgagtgtgaacttgctttttgctctcgagcattcaaggactgacaagggcatgttgcgtctatgctacgatgttggagattttaatcgatataacggctaactaggaaaaaaaaaaaaaaaaaaaa

SEQ ID NO: 11070 - protein, 71 aa, Zea mays; identical to SEQ ID NO: 10446
  misc_feature: Ceres CLONE ID no. 1709955
  misc_feature: Ceres CDNA ID no. 36707249
  misc_feature (1)..(60): Pfam Name: RNA_pol_N PFAM Desc: RNA polymerases N / 8 kDa subunit
  misc_feature: Homolog of GI Number: 62733950 NR Desc: dna
  misc_feature: Homolog of GI Number: 21537033 NR Desc: RNA polymerase II subunit
  misc_feature: Homolog of GI Number: 2833375 NR Desc: DNA
  misc_feature: Homolog of GI Number: 4508082 NR Desc: Putative RNA  polymerase II subunit Rpb10
  misc_feature: Homolog of GI Number: 33086454 NR Desc: Ab1
  misc_feature: Homolog of GI Number: 82915574 NR Desc:  polymerase
  misc_feature: Homolog of GI Number: 55635107 NR Desc:  similar to Ab1
  misc_feature: Homolog of GI Number: 72099707 NR Desc:  similar to DNA
  misc_feature: Homolog of GI Number: 62641959 NR Desc:  similar to Ab1
  misc_feature: Homolog of GI Number: 60473508 NR Desc: RNA polymerases N/8 kDa subunit

SEQ ID NO: 11071 - DNA, 692 bp, Zea mays
  misc_feature: Ceres CLONE ID no. 1709967
  misc_feature: Ceres CDNA ID no. 36707501
  CDS (1)..(675): REFERENCED BY SEQ ID NO: 11072
tggaagcagagcacactagcgttccctcaccagggcgtccatcccagcagccatggcgatggcgtacaagatggcgacggaggggatgaacgtgaaggaggagtgccaacgctggttcatggagatgaagtggaagaaggtgcaccgcttcgtggtgtacaagatcgacgagcggtcgcgcgccgtgctggtggacaaggtgggcggccccggggaagggtacgaggagctcgtggccgcgctgcccggcgacgactgccgctacgccgtcttcgacttcgacttcgtcaccgtcgacaactgccagaagagcaagatcttcttcatcgcctggtcaccggcggcgtcgaggatcagggccaagatcctgtacgcgacatcgaagcaaggcctgcggcggctgctggacggggtccactacgaggtgcaggccaccgacccctccgagatgggcttcgacgtcatcagaggccgcgcgcaatgaggcccccgctgcgctctgctcctatttacgtacttacctgtgcgtgggcgtgttctcctactactcactgctcagtagtcagtagtcatctgcgttcgtgtgtgtgtgtgtgtgatcggccggatgctaattggcgttggtgtgctcccgtagcgatcgatgctgccaatctgacgaggcttcgcgtgtaaaaaaaaaaaaaaaaaaa

SEQ ID NO: 11072 - protein, 143 aa, Zea mays
  misc_feature: Ceres CLONE ID no. 1709967
  misc_feature: Ceres CDNA ID no. 36707501
  misc_feature (16)..(143): Pfam Name: Cofilin_ADF PFAM Desc: Cofilin/tropomyosin
  misc_feature: Homolog of GI Number: 15293263 NR Desc: putative actin depolymerizing factor 5
  misc_feature: Homolog of GI Number: 25295742 NR Desc: actin depolymerizing factor 5
  misc_feature: Homolog of GI Number: 7270448 NR Desc: actin depolymerizing factor
  misc_feature: Homolog of GI Number: 18874466 NR Desc: actin depolymerizing factor
  misc_feature: Homolog of GI Number: 7330254 NR Desc: actin depolymerizing factor
  misc_feature: Homolog of GI Number: 4566614 NR Desc: actin depolymerizing factor
  misc_feature: Homolog of GI Number: 24745620 NR Desc: actin depolymerizing factor 6
  misc_feature: Homolog of GI Number: 77556720 NR Desc: Cofilin/tropomyosin
  misc_feature: Homolog of GI Number: 20197894 NR Desc: actin depolymerizing factor 6
  misc_feature: Homolog of GI Number: 21593877 NR Desc: Actin
MAMAYKMATEGMNVKEECQRWFMEMKWKKVHRFVVYKIDERSRAVLVDKVGGPGEGYEELVAALPGDDCRYAVFDFDFVTVDNCQKSKIFFIAWSPAASRIRAKILYATSKQGLRRLLDGVHYEVQATDPSEMGFDVIRGRAQ

SEQ ID NO: 11073 - DNA, 500 bp, Zea mays
  misc_feature: Ceres CLONE ID no. 1709974
  misc_feature: Ceres CDNA ID no. 40041577
  CDS (14)..(304): REFERENCED BY SEQ ID NO: 11074
agggggagagaaaatggcgtatttgtcccgcacagccgccgccgtcgccgtcgccgtgaggtcggcggtccgctccgcacctctcactggccgcgtcctcggagcgccactgccttcccttgcctcgccttccgctgcccggtccgcccgaatcctccgcaggacggcggccgcggcgtcggcggggctggagactctaatgccgctgcacagcgcggtggcggccgcgcggcttaggtcctgcatcgccgtcgactcctcgtgctggagctcgctctcgcaaggatatgctttgcctttatgagaggagaggtgcacctgaagaaaccaatgaacattaggaattacaaacaagggctgtaataatgtgattgttgtaaactaattttacctttgatgttcattgaatcatccacagatgtacaactggcatttgttgatgttgggattttatttacgtggatccatgaattacctgcgaaaaaaaaaaaaaaaaaaaa

SEQ ID NO: 11074 - protein, 96 aa, Zea mays; identical to SEQ ID NO: 8496
  misc_feature: Ceres CLONE ID no. 1709974
  misc_feature: Ceres CDNA ID no. 40041577
  misc_feature: Homolog of GI Number: 34913910 NR Desc: OSJNBa0024F24.29

SEQ ID NO: 11075 - DNA, 578 bp, Zea mays
  misc_feature: Ceres CLONE ID no. 1710090
  misc_feature: Ceres CDNA ID no. 35383555
  CDS (24)..(314): REFERENCED BY SEQ ID NO: 11076
agggggagaggccgagaggggaaatggcatcgttgtcccgcaccgctgctgccgctgtcgtggccctgaggtcggcggtccgctccgcgccccttaccggccgcgtcctcggagcgccactaccttcctttgcctcgccttccgctacccgctccgcccggatcctccgcaggtcggcggccgcggcgtcggcggggctggaaacgctaatgccgctgcacagcgcggtggctgccgcgcggcttaggtcctgcatcgccgtcgactcctcctgctggtgctcgctctcacaaggtttaaacaagcgcatctgaccatggctaggagctgagcagaagagaagatatgctttgcctttatgacagcgaggcgagctgcacctgaagaaacaaaagaatcttaggaattacaaacaagggctgtactgtaataatgtggttcttgtaaaccaattttgccttagaattctgtaacttgaatcatccacagatgtgcgactgtcttttgtttatgtggatctatgaattacctgccgctcctcgtttgaactaaaaaacgaaaaaaaaaaaaaaaaaaaa

SEQ ID NO: 11076 - protein, 96 aa, Zea mays
  misc_feature: Ceres CLONE ID no. 1710090
  misc_feature: Ceres CDNA ID no. 35383555
  misc_feature: Homolog of GI Number: 34913910 NR Desc: OSJNBa0024F24.29
MASLSRTAAAAVVALRSAVRSAPLTGRVLGAPLPSFASPSATRSARILRRSAAAASAGLETLMPLHSAVAAARLRSCIAVDSSCWCSLSQGLNKRI

SEQ ID NO: 11077 - DNA, 613 bp, Zea mays
  misc_feature: Ceres CLONE ID no. 1710351
  misc_feature: Ceres CDNA ID no. 36706924
  CDS (94)..(327): REFERENCED BY SEQ ID NO: 11078
acaatcagccatcgccaccacctccctccgcggctccgccttccgccgcgaacacgccgctgtctcgaccccttgtcctcctccttcagcaagatggcggagattgagataaaaacagcacctgctgacttccgcttccctacaacaaaccaaacaaggcattgttttactcgctatgtcgagtaccacaggtgtttgaatgccaaaggggatgatgctggtgtttgcgaaaaatttgccaagtactacaggtccctttgccctggagaatgggttgagaaatggaacgagcagagggagcatgggacgtttccaggacctctctgaatgtaccgcccgagacctccagttggaccagtcaacaagttggccaggcagtcctactgttccattctgcattcctacttccagaatcgtaaatgccttttgtcccttgctcttcaaccagtcaccacaaaactgttagtgatgcctctcgtatgcagctctaataatttggctacagttgccccacatgcagccttgttttgtgtgtggactgtggacctcattttgtaaacgtctgaatggacttgcattttctttcgtgcctacaaaaaaaaaaaaaaaaaaa

SEQ ID NO: 11078 - protein, 77 aa, Zea mays; identical to SEQ ID NO: 11016
  misc_feature: Ceres CLONE ID no. 1710351
  misc_feature: Ceres CDNA ID no. 36706924
  misc_feature (5)..(76): Pfam Name: COX6B PFAM Desc: Cytochrome oxidase c subunit VIb
  misc_feature: Homolog of GI Number: 50926015 NR Desc: OSJNBa0067K08.22
  misc_feature: Homolog of GI Number: 37991922 NR Desc: cytochrome c oxidase subunit 6b
  misc_feature: Homolog of GI Number: 22204116 NR Desc: putative cytochrome c oxidase subunit
  misc_feature: Homolog of GI Number: 21554378 NR Desc: cytochrome c oxidase subunit
  misc_feature: Homolog of GI Number: 20465723 NR Desc: putative cytochrome c oxidase subunit
  misc_feature: Homolog of GI Number: 34906824 NR Desc: putative cytochrome c oxidase subunit 6b
  misc_feature: Homolog of GI Number: 21592329 NR Desc: cytochrome c oxidase subunit 6b
  misc_feature: Homolog of GI Number: 70663890 NR Desc: OSJNBa0029H02.2
  misc_feature: Homolog of GI Number: 62644353 NR Desc:  similar to Cytochrome c oxidase polypeptide VIb
  misc_feature: Homolog of GI Number: 57086685 NR Desc:  similar to chymodenin

SEQ ID NO: 11079 - DNA, 648 bp, Zea mays
  misc_feature: Ceres CLONE ID no. 1710407
  misc_feature: Ceres CDNA ID no. 36707631
  CDS (77)..(517): REFERENCED BY SEQ ID NO: 11080
atcgtctttgctcgaggagtcgaggttcaggttccacggtgcggcgagagctcgcagccatggagagcaagagcccatggtcgctgcggctgctagtttgctgcgcggcaatggtggccgtcgcgcttctctcccagcaaggaggccaggccgcttgtttcgtgccgacgccgggtccagctccggcaccgccaggctcctccgcgacgaacacgaacgactcctccgctgctcctcggccagccaagtccagcgcattccaacccccaatgtacggtggtgtcacccccggcagcctccagccccacgagtgcggcggccggtgcgcggggcggtgctcggcgacggcgtaccagaagccgtgcctcttcttctgccgcaagtgctgcgcggcgtgcctgtgcgtgccgccgggcacctacggcaacaagaacacctgcccctgctacaacaactggaagaccaagctgggaggccccaagtgcccctagtagggcctccctctcggtctacttgatgagatcttctgttcaaaaaatcaaaaggaataagaatctgtttaaccatttttagatttcacaaataaaacaggtttgaatttatctttttagtgaaacgcttgcagcacaaaaaaaaaaaaaaaaaaaa

SEQ ID NO: 11080 - protein, 143 aa, Zea mays
  misc_feature: Ceres CLONE ID no. 1710407
  misc_feature: Ceres CDNA ID no. 36707631
  misc_feature (49)..(143): Pfam Name: GASA PFAM Desc: Gibberellin regulated protein
  misc_feature: Homolog of GI Number: 59042581 NR Desc: GASA2
  misc_feature: Homolog of GI Number: 44681330 NR Desc: At1g74670
  misc_feature: Homolog of GI Number: 12324817 NR Desc: GAST1
  misc_feature: Homolog of GI Number: 2982285 NR Desc: GASA5
  misc_feature: Homolog of GI Number: 16516821 NR Desc: gibberellin induced protein 3
  misc_feature: Homolog of GI Number: 825524 NR Desc: gip1
  misc_feature: Homolog of GI Number: 16516819 NR Desc: putative gibberellin induced protein 2
  misc_feature: Homolog of GI Number: 48375076 NR Desc: gibberellin
  misc_feature: Homolog of GI Number: 53793182 NR Desc: putative gibberellin induced protein 3
  misc_feature: Homolog of GI Number: 44889867 NR Desc: GASA
MESKSPWSLRLLVCCAAMVAVALLSQQGGQAACFVPTPGPAPAPPGSSATNTNDSSAAPRPAKSSAFQPPMYGGVTPGSLQPHECGGRCAGRCSATAYQKPCLFFCRKCCAACLCVPPGTYGNKNTCPCYNNWKTKLGGPKCP

SEQ ID NO: 11081 - DNA, 453 bp, Zea mays
  misc_feature: Ceres CLONE ID no. 1710594
  misc_feature: Ceres CDNA ID no. 35383556
  CDS (50)..(304): REFERENCED BY SEQ ID NO: 11082
gctgaatccagccgttttccctttccccagagattcgcatattctcgcgatgggagcggaggaagcagagggtactcccccgccgctgcccgccaccggcgagcccgcaaccacggcaagggcgcagccaatatctgcagcacaattcctctcctggaagcagcgcaaggatgcagaggtagccgcaaggaaagctgaagcagctgagaagcgagctgatgatatcgcttcgggagcggcgcagatgaacggccgcgagctgttccaacatgagccctgggtgttcgacaacaacatttactgagatcgtgtcgggctactgttcctgcattagtccaagctccagcggtggtttcattttgtactgctatatcagctttgcgaaactgtggattttatttcaccgtttctaagattattctctcaatagacgaaaaaaaaaaaaaaaaaaaa

SEQ ID NO: 11082 - protein, 84 aa, Zea mays; identical to SEQ ID NO: 9404
  misc_feature: Ceres CLONE ID no. 1710594
  misc_feature: Ceres CDNA ID no. 35383556
  misc_feature: Homolog of GI Number: 9280685 NR Desc: F2E2.21

SEQ ID NO: 11083 - DNA, 592 bp, Zea mays
  misc_feature: Ceres CLONE ID no. 1710637
  misc_feature: Ceres CDNA ID no. 36707137
  CDS (1)..(342): REFERENCED BY SEQ ID NO: 11084
actctcgcctctcccctcttcacccgtgggccgacgcgccgccgcagcaagcagccgagaggggaggggatgctagccgcacggaggggcgcggcggccgcgtgggcggcacaggccttccactcctcctccgcagcgctctccaaatccactcctcgattccgcttcaccgtccgtgaaaagcgaggggatgcgaagagcgcccttaagaaccttctgctcaatggcggcacatgtcaggaaagcagtaacaaacaaatgaggaagcagaaaggtggtaccgggtcgaaggctcagcgctctgctccaggaaaaaatccctgtggaaaaaataagcgctgaagcagaagaaaaattcagacggtgcgtggaagcgtataacgcattgactcgtgctttcagatcaagtggctaactaccgcgaggaattttgttctttatgatttgaggttttcttaggactcctagtgatgtgtgcgtggctgctggtcttcaggacacagagactgctagaagtgaagttcagagttatggcttcatgttgataacgaaatatataagcataatctttacaaaaaaaaaaaaaaaaaaa

SEQ ID NO: 11084 - protein, 90 aa, Zea mays
  misc_feature: Ceres CLONE ID no. 1710637
  misc_feature: Ceres CDNA ID no. 36707137
MLAARRGAAAAWAAQAFHSSSAALSKSTPRFRFTVREKRGDAKSALKNLLLNGGTCQESSNKQMRKQKGGTGSKAQRSAPGKNPCGKNKR

SEQ ID NO: 11085 - DNA, 547 bp, Zea mays
  misc_feature: Ceres CLONE ID no. 1710676
  misc_feature: Ceres CDNA ID no. 36707252
  CDS (81)..(269): REFERENCED BY SEQ ID NO: 11086
gctgggacagccccgccgccgcaacatcccgagtcgctcgtcagatcctccagcaacacagcaccttcgccgccgccgccatgggtaaggttcacggatcgctggcccgcgctgggaaggtgcgcgggcagacgcccaaggttgcaaagcaggacaagaagaagaagccccgcggccgcgctcacaagcgcatgcaatacaaccgccgcttcgtcaccgccgttgttggattcggcaagaagcgcggccccaactcatcggagaagtagatctagctatggctttgtgttttattccccactagtttcctcactgatggcaacttgctgaagacttatgctattatctgtatcgatgttactgcaatactgttaagtaggatatatgcatcgtttagttgatcaagttgcctgtggtggtgatccttttagtttgtctggaatgttggaaacatgtttgtgtcgtgctgtgttcgttttttttgaaactggtaacatgattgagtctaaatgccggtctattctgtcaaaaaaaaaaaaaaaaaaaa

SEQ ID NO: 11086 - protein, 62 aa, Zea mays; identical to SEQ ID NO: 38
  misc_feature: Ceres CLONE ID no. 1710676
  misc_feature: Ceres CDNA ID no. 36707252
  misc_feature (3)..(61): Pfam Name: Ribosomal_S30 PFAM Desc: Ribosomal protein S30
  misc_feature: Homolog of GI Number: 55773694 NR Desc: 40S ribosomal protein S30
  misc_feature: Homolog of GI Number: 30102786 NR Desc: At5g56670
  misc_feature: Homolog of GI Number: 25295582 NR Desc: 40S ribosomal protein S30
  misc_feature: Homolog of GI Number: 6679753 NR Desc: Finkel
  misc_feature: Homolog of GI Number: 15822932 NR Desc: Finkel
  misc_feature: Homolog of GI Number: 36968262 NR Desc: Finkel
  misc_feature: Homolog of GI Number: 60678256 NR Desc: Finkel
  misc_feature: Homolog of GI Number: 47682823 NR Desc: MGC80045 protein
  misc_feature: Homolog of GI Number: 50603825 NR Desc: MGC89853 protein
  misc_feature: Homolog of GI Number: 63694872 NR Desc:  similar to Finkel

SEQ ID NO: 11087 - DNA, 571 bp, Zea mays
  misc_feature: Ceres CLONE ID no. 1710687
  misc_feature: Ceres CDNA ID no. 35383557
  CDS (177)..(368): REFERENCED BY SEQ ID NO: 11088
aacacgcctcgatctagatccactcttcccccttctccttccggtcctccccccgagactattcatataggcgggtaggcgtccgaggcctcgtttgttctcggcttcttgtctccaagggtgctactccgtccgcgcttggtctgctctcgtccttccggaggccgcggcgcaacatggcgaagatcaagccgaaggccttgctcgcgcaaagcaaggtgaagaaggtccccggccaaatcagcgtggccacgatcgtcacctacatgatcctcggcgtcctggtcgtgtcctccgtttacgctgcctacaggtactgctgggcagtcacaggagcagcggaggcagtgggcgcccaggggaactgatcccccttccgactgcgtggctgatctcgctgttgttgtatcatccggttggggtaaaatttttggttgttgctgtctagcaaatggggttcatgggacatggataggttgtatgttgatacggttacaccgtagccgatgatatgtatgttgaatttcttcccttttattatcatttgaacaaaaaaaaaaaaaaaaaaaaa

SEQ ID NO: 11088 - protein, 63 aa, Zea mays; identical to SEQ ID NO: 10090
  misc_feature: Ceres CLONE ID no. 1710687
  misc_feature: Ceres CDNA ID no. 35383557
  misc_feature: Homolog of GI Number: 50937101 NR Desc: peptidyl

SEQ ID NO: 11089 - DNA, 594 bp, Zea mays
  misc_feature: Ceres CLONE ID no. 1710725
  misc_feature: Ceres CDNA ID no. 36707502
  CDS (1)..(345): REFERENCED BY SEQ ID NO: 11090
ccctccgccgtcgcctgtccactttccccgtgcttctccgccgtcgaggccgcgtcccagtgcgaagagaccacgactcagatggccagccgctgggtccggcccgaggtgtacccgctgttcgcggcaacgggcgtggccgtcggcatctgcggatttcagctcttccggaacatcaccggcaacccggaagtcagggtaaacaaggcagggagggcagctggtgtgcttgagaaccatgaggaggggaggcgttacgccatgcatggcctaagaagctttgtgcacgacaagactcctgagatcatgcctgcagttaacaagttcttcactgaccctaagtgaagcatgttgattggcatactactactactacttgctactggggattttacactttgctggcaactcaatatgttggggacatccctgacctctaaaagtacttttgagtgcttggtgatgacttgctatatgtatgatggtggatgagtttgatcgtccatgcttgatgttcatattcatctgtcatctggattcgccgcacttcagtgataaaattgtcatttggacgaaaaaaaaaaaaaaaaaaaa

SEQ ID NO: 11090 - protein, 87 aa, Zea mays; identical to SEQ ID NO: 4862
  misc_feature: Ceres CLONE ID no. 1710725
  misc_feature: Ceres CDNA ID no. 36707502
  misc_feature (2)..(87): Pfam Name: B12D PFAM Desc: B12D protein
  misc_feature: Homolog of GI Number: 18644696 NR Desc: putative G
  misc_feature: Homolog of GI Number: 3445292 NR Desc: B12Dg1
  misc_feature: Homolog of GI Number: 4530585 NR Desc: B12D protein
  misc_feature: Homolog of GI Number: 50935787 NR Desc: putative B12D protein
  misc_feature: Homolog of GI Number: 50935781 NR Desc: putative B12D protein
  misc_feature: Homolog of GI Number: 16506646 NR Desc: B12D
  misc_feature: Homolog of GI Number: 38194922 NR Desc: B12D

SEQ ID NO: 11091 - DNA, 497 bp, Zea mays
  misc_feature: Ceres CLONE ID no. 1710826
  misc_feature: Ceres CDNA ID no. 36707022
  CDS (77)..(388): REFERENCED BY SEQ ID NO: 11092
gtctcatctcttccatacgaccataccctacctccaaattcccaattgtcaacctctcctcagagttcgagtgaccatgtcggggcgcggaaagggcgggaaggggctgggcaagggcggcgcgaagcgtcaccgcaaggtcctccgcgacaacatccagggcattacgaagccggcgatccggaggctggcgagaaggggcggcgtgaagcgcatctcggggctcatctacgaggagacccgcggcgtgctcaagaccttcctcgagaatgtcattcgcgacgctgtcacctacacggagcacgcccgccgtaagaccgtcaccgccatggacgtcgtctacgcgctcaagcggcagggccgcaccctctacggatttggcggctgaggggtcaggggtgtccgccagctgctgctggtcgtggcagaagtcttgggtcgcggtcacgaaatggagtgattcgagagtattcttgtaaaaaaaaaaaaaaaaaaaa

SEQ ID NO: 11092 - protein, 103 aa, Zea mays
  misc_feature: Ceres CLONE ID no. 1710826
  misc_feature: Ceres CDNA ID no. 36707022
  misc_feature (66)..(92): Pfam Name: TAF PFAM Desc: TATA box binding protein associated factor
  misc_feature: Homolog of GI Number: 57098917 NR Desc:  similar to germinal histone H4 gene
  misc_feature: Homolog of GI Number: 68362800 NR Desc:  similar to germinal histone H4 gene
  misc_feature: Homolog of GI Number: 27692960 NR Desc: Hist1h4h protein
  misc_feature: Homolog of GI Number: 37590121 NR Desc: Hist1h4h protein
  misc_feature: Homolog of GI Number: 76631272 NR Desc:  similar to germinal histone H4 gene
  misc_feature: Homolog of GI Number: 76651053 NR Desc:  similar to germinal histone H4 gene
  misc_feature: Homolog of GI Number: 83030220 NR Desc:  similar to germinal histone H4 gene
  misc_feature: Homolog of GI Number: 61835903 NR Desc:  similar to germinal histone H4 gene
  misc_feature: Homolog of GI Number: 61871726 NR Desc:  similar to germinal histone H4 gene
  misc_feature: Homolog of GI Number: 50729214 NR Desc:  similar to germinal histone H4 gene
MSGRGKGGKGLGKGGAKRHRKVLRDNIQGITKPAIRRLARRGGVKRISGLIYEETRGVLKTFLENVIRDAVTYTEHARRKTVTAMDVVYALKRQGRTLYGFGG

SEQ ID NO: 11093 - DNA, 769 bp, Zea mays
  misc_feature: Ceres CLONE ID no. 1710893
  misc_feature: Ceres CDNA ID no. 36707234
  CDS (59)..(508): REFERENCED BY SEQ ID NO: 11094
ctgatccactctccgcttcccgctccgatcgacctgctccctccccaccaccgagcccatggcggaccagctcaccgacgaccagatcgccgagttcaaggaggccttcagcctcttcgacaaggacggggatggttgcatcacgaccaaggagctgggcactgtcatgcgctcgctggggcaaaatcctacagaggctgagctccaggacatgatcaacgaggtcgatgctgatggaaacggcaccatcgatttcccagagtttctcaaccttatggctcgcaagatgaaggacaccgactctgaggaagagctcaaggaggccttccgtgtgtttgacaaggaccagaacggcttcatctcggccgccgagctccgccatgtcatgacaaatcttggtgagaagctaactgatgaggaggtggacgagatgatccgtgaggctgatgtcgatggtgatggccagatcaactatgtggagtttgtcaaggtcatgatggccaagtgagccacagaaccataatctgaaggcagagaagattctgcattgcatattagtcaagatgcaactttttattccatcgacttctagtgaaacattctgctagttgtagttgctgaaaatggcaatgtagttcctgctttgttcttccctccagtgtgttttcataactgttgtttcatgtgaacttgtaatgattgccctctctgctgtgtcttgattgcagttaaaatcatatgtagtttcaccccaaaaaaaaaaaaaaaa

SEQ ID NO: 11094 - protein, 149 aa, Zea mays
  misc_feature: Ceres CLONE ID no. 1710893
  misc_feature: Ceres CDNA ID no. 36707234
  misc_feature (12)..(40): Pfam Name: efhand PFAM Desc: EF hand
  misc_feature: Homolog of GI Number: 50299501 NR Desc: calmodulin cam
  misc_feature: Homolog of GI Number: 20190 NR Desc: calmodulin
  misc_feature: Homolog of GI Number: 1755001 NR Desc: calmodulin TaCaM2
  misc_feature: Homolog of GI Number: 21913285 NR Desc: calmodulin 1
  misc_feature: Homolog of GI Number: 34304717 NR Desc: calmodulin 8
  misc_feature: Homolog of GI Number: 42374718 NR Desc: calmodulin
  misc_feature: Homolog of GI Number: 4103961 NR Desc: calmodulin
  misc_feature: Homolog of GI Number: 50299519 NR Desc: calmodulin cam
  misc_feature: Homolog of GI Number: 4959148 NR Desc: calmodulin mutant SYNCAM35
  misc_feature: Homolog of GI Number: 50748592 NR Desc:  similar to calmodulin 1
MADQLTDDQIAEFKEAFSLFDKDGDGCITTKELGTVMRSLGQNPTEAELQDMINEVDADGNGTIDFPEFLNLMARKMKDTDSEEELKEAFRVFDKDQNGFISAAELRHVMTNLGEKLTDEEVDEMIREADVDGDGQINYVEFVKVMMAK

SEQ ID NO: 11095 - DNA, 611 bp, Zea mays
  misc_feature: Ceres CLONE ID no. 1711203
  misc_feature: Ceres CDNA ID no. 40041578
  CDS (34)..(297): REFERENCED BY SEQ ID NO: 11096
caatgctggctaagtgttagaagcatctctggaatgcttcgtgtagtaaaaaaaaaaaaaaaaagaaaaaaaaaaaaagaaaaaaaaaaaaaaaaaaaaaaaaacaaaaaaaaaaaaaaaaaaaactcgagtttttttttttttttttttgttcgcctccgccgacgcgctcagatctggctccccgagtcgttaacttgcggtgctgatgcgcatgcgtcgcgcacgtggcgcccatccattggttgcgaggagaacaaagcgttgttagtaggcgagcatatcaaaaagaaataggggagaaaagcgtggtgaaaaaacgttgatttccatagctaaattaggggaagacttggggagataaaaaggcagagctaagttgtgtgctgatggggatttccatcatattatgccaaagcggcatctacttgagagagacaaaaaaaaagagagagagagaggatctttgcagcgcacgattccaagattttgttgattcttattagtgggttcttttttttttgtaaagtgcatcgggtgtttcttccttgccgttgtctgtacctataatttagctaaaaaaaaaaaaacaaaaaaaaaaaaaaaaaaaa

SEQ ID NO: 11096 - protein, 87 aa, Zea mays
  misc_feature: Ceres CLONE ID no. 1711203
  misc_feature: Ceres CDNA ID no. 40041578
  misc_feature: Homolog of GI Number: 45825067 NR Desc: LP04080p
  misc_feature: Homolog of GI Number: 34911092 NR Desc: OJ1117_G01.13
MLRVVKKKKKRKKKKEKKKKKKKNKKKKKKNSSFFFFFFVRLRRRAQIWLPESLTCGADAHASRTWRPSIGCEENKALLVGEHIKKK

SEQ ID NO: 11097 - DNA, 476 bp, Zea mays
  misc_feature: Ceres CLONE ID no. 1711453
  misc_feature: Ceres CDNA ID no. 40041579
  CDS (16)..(273): REFERENCED BY SEQ ID NO: 11098
actcaagatatagggatgggattgggttctcgccgagctcctcctccattaccgtcgaagctacgcggccctcctcctgcagctcgccgcgctggacgccatctccagcgcgcgtgccccctctctgctcagatccgatggccgtcgagcactacacccgcagcgcgctcctcgacccccgagatacctccttcctcgctaaccatcgccaaccaatttcggggagaagtgtgggggaatcgggtcgccagctctgatcgtgcgccaccgtaagctgtccatctccgtggagaattccctgcgtagcacataattcggtaagcccttgctgtttatcgtacttaacattcagcgtaggattcgggtgctagcgattgggagttctcgggtggattgggcatcaccgaccggaagccgacatgagaataacgctattctaggcattaaataacttcgaaaaaaaaaaaaaaaaaaaa

SEQ ID NO: 11098 - protein, 85 aa, Zea mays
  misc_feature: Ceres CLONE ID no. 1711453
  misc_feature: Ceres CDNA ID no. 40041579
MGLGSRRAPPPLPSKLRGPPPAARRAGRHLQRACPLSAQIRWPSSTTPAARSSTPEIPPSSLTIANQFRGEVWGNRVASSDRAPP

SEQ ID NO: 11099 - DNA, 507 bp, Zea mays
  misc_feature: Ceres CLONE ID no. 1711530
  misc_feature: Ceres CDNA ID no. 36707025
  CDS (80)..(271): REFERENCED BY SEQ ID NO: 11100
acacggatcgaaaacgaattaccctcggtgccctccctctcggcggcggcgcaagtccccttcatctccggcgcggcaaatggcaggtggcagggttgcacatgctaccctcaagggccccagcgtggtgaaggagatcttcattggactgaccctgggtctgatcgctggaggtatgtggaagatgcaccactggaacgagcagaggaaaactagatccttctacgacatgcttgacaagggccagatcagcgtcgtcgtcgaggagtagttcccacgtgtcacctcagaagtttttttttccagttgtttttgaaaactcactctggagggcacgacaaagtgaatgctgtggagatttggcttgaaaataagcataccatttgagaacaccagcttctgttgaattgtcttttcttgtcatgactatttgagcatgtccgtgtcgtaaccaaacatctgatctactttacaatatgttttatgcaaaaaaaaaaaaaaaaaaaa

SEQ ID NO: 11100 - protein, 63 aa, Zea mays; identical to SEQ ID NO: 6664
  misc_feature: Ceres CLONE ID no. 1711530
  misc_feature: Ceres CDNA ID no. 36707025
  misc_feature (2)..(63): Pfam Name: COX5C PFAM Desc: Cytochrome c oxidase subunit Vc
  misc_feature: Homolog of GI Number: 1070356 NR Desc: cytochrome c oxidase
  misc_feature: Homolog of GI Number: 48428177 NR Desc: Cytochrome c oxidase polypeptide Vc
  misc_feature: Homolog of GI Number: 2275216 NR Desc: putative cytochrome c oxidase Vc subunit
  misc_feature: Homolog of GI Number: 7340711 NR Desc: cytochrome c oxidase subunit 5c
  misc_feature: Homolog of GI Number: 18409602 NR Desc: cytochrome c oxidase subunit 5c
  misc_feature: Homolog of GI Number: 21593916 NR Desc: cytochrome c oxidase subunit
  misc_feature: Homolog of GI Number: 18409600 NR Desc: cytochrome c oxidase subunit 5c
  misc_feature: Homolog of GI Number: 10178149 NR Desc: cytochrome c oxidase Vc subunit
  misc_feature: Homolog of GI Number: 4105786 NR Desc: PGPS/D8

SEQ ID NO: 11101 - DNA, 601 bp, Zea mays
  misc_feature: Ceres CLONE ID no. 1711550
  misc_feature: Ceres CDNA ID no. 36707138
  CDS (92)..(325): REFERENCED BY SEQ ID NO: 11102
gctgagccatcgccaccacctccctccgcggctccgccttccgccgcgaacacgccgctgtctcgaccccttgtcctcctccttcagcaagatggcggagattgagataaaaacagcacctgctgacttccgcttccctacaacaaaccaaacaaggcattgttttactcgctatgtcgagtaccacaggtgtttgaatgccaaaggggatgatgctggtgtttgcgaaaaatttgccaagtactacaggtccctttgccctggagaatgggttgagaaatggaacgagcagagggagcatgggacgtttccaggacctctctgaatgtaccgcccgagacctccagttggaccagtcaacaagttggccaggcagtcctactgttccattctgcattcctacttccagaatcgtaaatgccttttgtcccttgctcttcaaccagtcaccacaaaactgttagtgatgcctctcgtatgcagctctaataatttggctacagttgccccacatgcaaccttgttttgtgtgtggactgtggacctcattttgtaaacgtctgaatggacttgcattttctttcgtgccaaaaaaaaaaaa

SEQ ID NO: 11102 - protein, 77 aa, Zea mays; identical to SEQ ID NO: 11016
  misc_feature: Ceres CLONE ID no. 1711550
  misc_feature: Ceres CDNA ID no. 36707138
  misc_feature (5)..(76): Pfam Name: COX6B PFAM Desc: Cytochrome oxidase c subunit VIb
  misc_feature: Homolog of GI Number: 50926015 NR Desc: OSJNBa0067K08.22
  misc_feature: Homolog of GI Number: 37991922 NR Desc: cytochrome c oxidase subunit 6b
  misc_feature: Homolog of GI Number: 22204116 NR Desc: putative cytochrome c oxidase subunit
  misc_feature: Homolog of GI Number: 21554378 NR Desc: cytochrome c oxidase subunit
  misc_feature: Homolog of GI Number: 20465723 NR Desc: putative cytochrome c oxidase subunit
  misc_feature: Homolog of GI Number: 34906824 NR Desc: putative cytochrome c oxidase subunit 6b
  misc_feature: Homolog of GI Number: 21592329 NR Desc: cytochrome c oxidase subunit 6b
  misc_feature: Homolog of Homolog of GI Number: 70663890 NR Desc: OSJNBa0029H02.2
  misc_feature: Homolog of GI Number: 62644353 NR Desc:  similar to Cytochrome c oxidase polypeptide VIb
  misc_feature: Homolog of GI Number: 57086685 NR Desc:  similar to chymodenin

SEQ ID NO: 11103 - DNA, 526 bp, Zea mays
  misc_feature: Ceres CLONE ID no. 1711557
  misc_feature: Ceres CDNA ID no. 36707026
  CDS (72)..(356): REFERENCED BY SEQ ID NO: 11104
acagttccacgccgccactccccccaacccgaccacgctgcgcctccgcttgacccccagccgagggaggaatgggtaagggtacgggcagcttcggcaagcgccggaacaagacgcacacgctctgcatccgctgcggccgccgcagcttccacctccagaagagtacctgctcctcctgcggttaccccgccgcccgcatccgcaagtataactggagtgtgaaggccatcaggcgcaagacaaccggtaccggaaggatgaggtacatgcgccacgtgcctcgccgtttcaagagcaacttcagagaagggactgaggctgctcccaagaagagtgctgccgctgccaactaagtctggatgttgctatcaagaacctgataagctagaacattggaacattttgcttgagttgtacttctgaactatttagcccaaatactctggatgtactggtttatagtgctttgaattaaagtcagacgccctggtggtttgatgttgaaaaaaaaaaaaaaaaaaaa

SEQ ID NO: 11104 - protein, 94 aa, Zea mays; identical to SEQ ID NO: 5516
  misc_feature: Ceres CLONE ID no. 1711557
  misc_feature: Ceres CDNA ID no. 36707026
  misc_feature (2)..(55): Pfam Name: Ribosomal_L37e PFAM Desc: Ribosomal protein L37e
  misc_feature: Homolog of GI Number: 50904689 NR Desc: putative 60S ribosomal protein L37
  misc_feature: Homolog of GI Number: 50915832 NR Desc: putative ribosomal protein L37
  misc_feature: Homolog of GI Number: 44662866 NR Desc: ribosomal protein L37
  misc_feature: Homolog of GI Number: 21553481 NR Desc: putative ribosomal protein
  misc_feature: Homolog of GI Number: 21537060 NR Desc: putative 60s ribosomal protein L37
  misc_feature: Homolog of GI Number: 21280805 NR Desc: putative 60S ribosomal protein L37
  misc_feature: Homolog of GI Number: 24642107 NR Desc: CG9091
  misc_feature: Homolog of GI Number: 45934571 NR Desc: 60S ribosomal protein L37
  misc_feature: Homolog of GI Number: 38048279 NR Desc: similar to Drosophila melanogaster CG9091
  misc_feature: Homolog of GI Number: 62548130 NR Desc: ribosomal protein L37

SEQ ID NO: 11105 - DNA, 626 bp, Zea mays
  misc_feature: Ceres CLONE ID no. 1711627
  misc_feature: Ceres CDNA ID no. 36707236
  CDS (84)..(566): REFERENCED BY SEQ ID NO: 11106
atcacttatcatccccatccgcacctctctccatctccctgctcctccgcctccttcttgatccagccaagccagggatcgccatgtcggactcggaggagcaccacttcgaatcgaaggccgacgccggagcgtccaagacctacccgcagcaggctggcaccgtccgtaagaacggcttcatcgtcatcaagaaccgcccctgcaaggttgtggaggtttctacctcaaagactggtaagcatggccatgccaaatgccactttgttgccatagacatattcaacgggaaaaagctcgaagatattgttccttcgtcacacaactgtgatattccgcatgtgaaccgtactgagtaccagctgattgatatatcagaggatggatttgtgagccttcttacttcagatggcaacactaaggatgatcttagactcccaactgatgagactcttgtggcccagatcaaggaagggtttgaaagcggcaaggatcttgttgtgactgtccagtctgctatgggggaggagcagatctgcgcgctgaaggatgttggccccaagtaacttccctgccttggaatactgtatctcaaaacctaaatcagaaaaaaaaaaaaaaaaaaa

SEQ ID NO: 11106 - protein, 160 aa, Zea mays; identical to SEQ ID NO: 160
  misc_feature: Ceres CLONE ID no. 1711627
  misc_feature: Ceres CDNA ID no. 36707236
  misc_feature (28)..(64): Pfam Name: KOW PFAM Desc: KOW motif
  misc_feature (86)..(155): Pfam Name: eIF PFAM Desc: Eukaryotic initiation factor 5A hypusine
  misc_feature: Homolog of GI Number: 1546919 NR Desc: translation initiation factor 5A
  misc_feature: Homolog of GI Number: 50938957 NR Desc: translation initiation factor 5A
  misc_feature: Homolog of GI Number: 77555893 NR Desc: translation initiation factor eIF
  misc_feature: Homolog of GI Number: 13236654 NR Desc: translation initiation factor 5A
  misc_feature: Homolog of GI Number: 33325119 NR Desc: eukaryotic translation initiation factor 5A isoform II
  misc_feature: Homolog of GI Number: 8919176 NR Desc: translation initiation factor
  misc_feature: Homolog of GI Number: 33325121 NR Desc: eukaryotic translation initiation factor 5A isoform III
  misc_feature: Homolog of GI Number: 33325127 NR Desc: eukaryotic translation initiation factor 5A isoform VI
  misc_feature: Homolog of GI Number: 33325131 NR Desc: eukaryotic translation initiation factor 5A isoform VIII
  misc_feature: Homolog of GI Number: 33325123 NR Desc: eukaryotic translation initiation factor 5A isoform IV

SEQ ID NO: 11107 - DNA, 1328 bp, Zea mays
  misc_feature: Ceres CLONE ID no. 1711816
  misc_feature: Ceres CDNA ID no. 40041580
  CDS (97)..(1068): REFERENCED BY SEQ ID NO: 11108
aacctcttctctcacatcacagagtcgcacgcacgcctcctcccctccctccccccctcacttcccacgcctcctcaccgcgcgcagatcggaggaatggtgagcgcgtcgagcctgctcctcccgacctccgtgcgggacctggcctcctgcgtctccgacggcgccgtccgcgtcgcctgcaccagcccggcgtccacgctcacggtctcctcctcctcctccaccacctcctcgccgccgccggccacgctctccgtcgccatctcctaccgcgccaccccgcaggccccgtcgtcgccgccgctcttgctgcgcctcacctggtcgcactcccggcacgggcccccgacgctctccttcgccggacccaccgcgtcgtcccccgccgtcctcctccgccgccgcaggggcacctactgcctcccctcctccacctccacatccacccacatccccccgctcgctctcttctgggacctaaccgccgccaggtacagtccggcctcgtccccgtccccggagccagcctccgggttctacgtcgtcgccgtcgccagcgccgaggtggtgctggccgtgggcgacctggcggcggagttcatcaaggcgaagttcgagggccagatcccctgggcgcggtccatcctccccgtgtcccgcaccgaccgggtcgtggcggcggcgccgcggccgggcggggcggttcacacggcgcgggtccggttcggcgagggcgcgccggagcacgaggtggccgtgggctgctgccgcgccggcgccggcaggcccggggaggaggagctctgggtcagcgtggacggcaagcgcgccgtgcacgcgcggcgcctgcgctggaacttccggggcaaccagacggtgttcgtggacggggcgcccgtcgacgtcctgtgggacctccacggctggtggttccaggacccgcccggctgcgccgtcgtgatgctccgcgccaggagcgcgctcgagagccggctctggctggaggaggaggccagggcgcccgggttcgcgctcctcgtgcaggccttgaggacgccgccctgatcttggtggtccttgaatcctgatgaagaggtcaaatgctcactgcctgctggttgatcatgtttcctttgactcgggaatttggtgggtggtatttagcaaaccaaaccaaattcagccgggggggaatggtggctgcgttggcaatctagacgtttgtaggttccggtgtgttgaatgggtttgggaggacaccatggattttcatgtggttttggtataccaagaggagatatattgatcaaaaaaaaaaaaaaaaa

SEQ ID NO: 11108 - protein, 323 aa, Zea mays
  misc_feature: Ceres CLONE ID no. 1711816
  misc_feature: Ceres CDNA ID no. 40041580
  misc_feature: Homolog of GI Number: 67987177 NR Desc: 4Fe
  misc_feature: Homolog of GI Number: 21992 NR Desc: extensin
  misc_feature: Homolog of GI Number: 76262498 NR Desc: pherophorin
  misc_feature: Homolog of GI Number: 76262500 NR Desc: pherophorin
  misc_feature: Homolog of GI Number: 60678627 NR Desc: plus agglutinin
  misc_feature: Homolog of GI Number: 12018147 NR Desc: vegetative cell wall protein gp1
  misc_feature: Homolog of GI Number: 14253159 NR Desc: VMP3 protein
MVSASSLLLPTSVRDLASCVSDGAVRVACTSPASTLTVSSSSSTTSSPPPATLSVAISYRATPQAPSSPPLLLRLTWSHSRHGPPTLSFAGPTASSPAVLLRRRRGTYCLPSSTSTSTHIPPLALFWDLTAARYSPASSPSPEPASGFYVVAVASAEVVLAVGDLAAEFIKAKFEGQIPWARSILPVSRTDRVVAAAPRPGGAVHTARVRFGEGAPEHEVAVGCCRAGAGRPGEEELWVSVDGKRAVHARRLRWNFRGNQTVFVDGAPVDVLWDLHGWWFQDPPGCAVVMLRARSALESRLWLEEEARAPGFALLVQALRTPP
